(19) United States
(12) Patent Application Publication
(10) Pub. No.: US 2011/0117128 A1
(43) Pub. Date: May 19, 2011

(54) Compositions that Include Hemagglutinin, Methods of Making and Methods of Use Thereof

(76) Inventors: Thomas J. Powell, Madison, CT (US); Albert E. Price, New Haven, CT (US); Valerian Nakaar, Hamden, CT (US); Robert K. Evans, Souderton, PA (US)

(21) Appl. No.: 12/948,241

(22) Filed: Nov. 17, 2010

Related U.S. Application Data
(63) Continuation of application No. 11/714,684, filed on Mar. 6, 2007, now abandoned.
(60) Provisional application No. 60/779,854, filed on Mar. 7, 2006.
(60) Provisional application No. 60/784,497, filed on Mar. 20, 2006.
(60) Provisional application No. 60/790,457, filed on Apr. 7, 2006.
(60) Provisional application No. 60/814,292, filed on Jun. 16, 2006.
(60) Provisional application No. 60/830,881, filed on Jul. 14, 2006.
(60) Provisional application No. 60/838,007, filed on Aug. 16, 2006.
(60) Provisional application No. 60/856,451, filed on Nov. 3, 2006.

(51) Int. Cl. A61K 39/145; C07K 14/255; A61P 37/04; A61P 31/16

(52) U.S. Cl. 424/210.1; 530/350; 424/209.1

(57) ABSTRACT

Compositions comprise a flagellin component that is at least a portion of a flagellin, wherein the flagellin component includes at least one cysteine residue and whereby the flagellin component activates a Toll-like Receptor 5. Compositions can further include an antigen, such as an influenza antigen. The compositions are used to stimulate an immune response and a protective immune response in a subject.

### RELATED APPLICATIONS

[0001] This application is a continuation of U.S. application Ser. No. 11/714,684, filed on Mar. 6, 2007, which claims the benefit of U.S. Provisional Application Nos. 60/779,854, filed on Mar. 7, 2006; 60/784,497, filed on Mar. 20, 2006; 60/790,457, filed on Apr. 7, 2006; 60/814,292, filed on Jun. 16, 2006; 60/830,881, filed on Jul. 14, 2006; 60/838,007, filed on Aug. 16, 2006; and 60/856,451, filed on Nov. 3, 2006. The entire teachings of the above applications are incorporated herein by reference.

### BACKGROUND OF THE INVENTION

[0002] Viral influenza infection can lead to disease. Strategies to prevent and manage disease associated with viral influenza infection can include vaccines with inactivated viruses and drugs. However, such strategies can be costly to maintain supply with demand and, thus, be limited in supply; may result in variable protection and less than satisfactory alleviation of symptoms, thereby ineffectively preventing or treating illness and, in some instances death, consequent to disease associated with viral influenza infection. Thus, there is a need to develop new, improved and effective methods of treatment for preventing and managing disease associated with viral influenza infection.

### SUMMARY OF THE INVENTION

[0003] The present invention relates to compositions, such as compositions that stimulate a protective immune response, and methods of making proteins that stimulate a protective immune response in a subject.

[0004] In one embodiment, the invention is a method of making a protein that stimulates a protective immune response in a subject, comprising the steps of separating a portion of a protein from a naturally occurring viral hemagglutinin to thereby form a protein portion, wherein the protein portion includes at least a portion of a globular head, and at least a portion of at least one secondary structure that causes the globular head to essentially retain its tertiary structure, and wherein the protein portion lacks a membrane fusion domain, a transmembrane domain and a cytoplasmic domain; transforming a nucleic acid sequence encoding the protein portion into a prokaryotic host cell; and culturing the prokaryotic host cell to thereby make the protein that stimulates a protective immune response in a subject.

[0005] In another embodiment, the invention is a method of making a protein that stimulates a protective immune response in a subject, comprising the steps of separating a portion of a protein from a naturally occurring viral hemagglutinin to thereby form a protein portion, wherein the protein portion includes at least a portion of a globular head, and at least a portion of at least one secondary structure that causes the globular head to essentially retain its tertiary structure, and wherein the protein portion lacks a membrane fusion domain, a transmembrane domain and a cytoplasmic domain; transfecting a nucleic acid sequence encoding the protein portion into a eukaryotic host cell, wherein the eukaryotic host cell is not a Pichia pastoris eukaryotic host cell; and culturing the eukaryotic host cell to thereby make the protein that stimulates a protective immune response in a subject.

[0006] In another embodiment, the invention is a method of making a protein that stimulates a protective immune response in a subject, comprising the steps of separating a portion of a protein from a naturally occurring viral hemagglutinin to thereby form a protein portion, wherein the protein portion includes at least a portion of a globular head, and at least a portion of at least one secondary structure that causes the globular head to essentially retain its tertiary structure, and wherein the protein portion lacks a membrane fusion domain, a transmembrane domain and a cytoplasmic domain; transfecting a nucleic acid sequence encoding the protein portion into a eukaryotic host cell, wherein the eukaryotic host cell is not a Drosophila melanogaster eukaryotic host cell; and culturing the eukaryotic host cell to thereby make the protein that stimulates a protective immune response in a subject.

[0007] In a further embodiment, the invention is a method of making a protein that stimulates a protective immune response in a subject, comprising the steps of separating a portion of a protein from a naturally occurring viral hemagglutinin to thereby form a protein portion, wherein the protein portion includes at least a portion of a globular head, and at least a portion of at least one secondary structure that causes the globular head to essentially retain its tertiary structure, and wherein the protein portion lacks a membrane fusion domain, a transmembrane domain and a cytoplasmic domain; transfecting a nucleic acid sequence encoding the protein portion into a eukaryotic host cell, wherein the eukaryotic host cell is not an insect eukaryotic host cell; and culturing the eukaryotic host cell to thereby make the protein that stimulates a protective immune response in a subject.

[0008] In a further embodiment, the invention is a method of making a protein that stimulates a protective immune response in a subject, comprising the steps of separating a portion of a protein from a naturally occurring viral hemagglutinin to thereby form a protein portion, wherein the protein portion includes at least a portion of a globular head, and at least a portion of at least one secondary structure that causes the globular head to essentially retain its tertiary structure, and wherein the protein portion lacks a membrane fusion domain, a transmembrane domain and a cytoplasmic domain; transfecting a nucleic acid sequence encoding the protein portion into a eukaryotic host cell, wherein the eukaryotic host cell is not a stably transformed insect host cell; and culturing the eukaryotic host cell to thereby make the protein that stimulates a protective immune response in a subject.

[0009] In still another embodiment, the invention is a method of making a protein that stimulates a protective immune response in a subject, comprising the steps of separating a portion of a protein from a naturally occurring viral hemagglutinin to thereby form a protein portion, wherein the protein portion includes at least a portion of a globular head, and at least a portion of at least one secondary structure that causes the globular head to essentially retain its tertiary structure, and wherein the protein portion lacks a membrane fusion domain, a transmembrane domain and a cytoplasmic domain; transfecting a nucleic acid sequence encoding the protein portion into a eukaryotic host cell, wherein the eukaryotic host cell is neither a Picia pastoris eukaryotic host cell nor a stably transfected insect host cell; and culturing the eukaryotic host cell to thereby make the protein that stimulates a protective immune response in a subject.

[0010] In yet another embodiment, the invention is a method of stimulating protective immunity in a subject, comprising the step of administering to the subject a composition that includes a protein made by a method comprising the steps of separating a portion of a protein from a naturally occurring viral hemagglutinin to thereby form a protein portion, wherein the protein portion includes at least a portion of a globular head, and at least a portion of at least one secondary structure that causes the globular head to essentially retain its tertiary structure, and wherein the protein portion lacks a membrane fusion domain, a transmembrane domain and a cytoplasmic domain; transforming a nucleic acid sequence encoding the portion into a prokaryotic host cell; and culturing the prokaryotic host cell to thereby make the protein that stimulates a protective immune response in a subject.

[0011] In an additional embodiment, the invention is a method of stimulating protective immunity in a subject, comprising the step of administering to the subject a composition that includes a protein portion of a naturally occurring viral hemagglutinin, wherein the protein portion includes at least a portion of a globular head, and at least a portion of one secondary structure that causes the globular head to essentially retain its tertiary structure and wherein the protein portion lacks a membrane fusion domain, a transmembrane domain and a cytoplasmic domain.

[0012] In still another embodiment, the invention is a method of making a viral hemagglutinin protein that stimulates a protective immune response in a subject, comprising the steps of separating a portion of a protein from a naturally occurring viral hemagglutinin to thereby form a protein portion, wherein the protein portion includes at least a portion of a globular head and at least a portion of at least one secondary structure that causes the globular head to essentially retain its tertiary structure, and wherein the protein portion lacks a membrane fusion domain, a transmembrane domain and a cytoplasmic domain; transfecting a nucleic acid sequence encoding the portion in a eukaryotic host cell, wherein the eukaryotic host cell is neither a Pichia pastoris eukaryotic host cell nor a stably transfected insect host cell; and culturing the eukaryotic host cell to thereby make the protein that stimulates a protective immune response in a subject.

[0013] In another embodiment, the invention is a method of making a protein that stimulates a protective immune response in a subject, comprising the steps of separating a portion of a protein from a naturally occurring viral hemagglutinin to thereby make a protein portion, wherein the protein portion includes at least a portion of a globular head, and at least a portion of at least one secondary structure that causes the globular head to essentially retain its tertiary structure, and wherein the protein portion lacks a membrane fusion domain, a transmembrane domain and a cytoplasmic domain; infecting a nucleic acid sequence encoding the protein portion into an insect cell host cell; and culturing the insect host cell to thereby make the protein that stimulates a protective immune response in a subject.

[0014] In another embodiment, the invention is a method of making a viral hemagglutinin protein that stimulates a protective immune response in a subject, comprising the steps of transforming a prokaryotic host cell with a nucleic acid sequence encoding at least one viral hemagglutinin that lacks a transmembrane domain and a cytoplasmic domain; and culturing the prokaryotic cell to thereby make the protein.

[0015] In a further embodiment, the invention is a method of stimulating protective immunity in a subject, comprising the step of administering to the subject a composition that includes a protein made by a method comprising the steps of transforming a prokaryotic host cell with a nucleic acid sequence encoding at least one viral hemagglutinin that lacks a transmembrane domain and a cytoplasmic domain; and culturing the prokaryotic host cell to thereby make the protein.

[0016] In another embodiment, the invention is a method of stimulating protective immunity in a subject, comprising the step of administering to the subject a composition that includes a protein having at least one viral hemagglutinin that lacks a transmembrane domain and a cytoplasmic domain, wherein the protein was expressed in a prokaryotic cell.

[0017] In an additional embodiment, the invention is a composition comprising at least a portion of at least one pathogen-associated molecular pattern and a portion of a protein of a naturally occurring viral hemagglutinin, wherein the portion of the naturally occurring viral hemagglutinin includes at least a portion of a globular head and at least a portion of at least one secondary structure that causes the globular head to essentially retain its tertiary structure, and wherein the portion of the naturally occurring viral hemagglutinin lacks a membrane fusion domain, a transmembrane domain, and a cytoplasmic domain.

[0018] Another embodiment of the invention is a composition comprising a flagellin component that is at least a portion of a flagellin, wherein the flagellin component includes at least one cysteine residue and whereby the flagellin component activates a Toll-like Receptor 5.

[0019] In still another embodiment, the invention is a composition comprising a Toll-like Receptor agonist component that is at least a portion of a Toll-like Receptor agonist, wherein the Toll-like Receptor agonist component includes at least one cysteine residue in a position where a cysteine residue does not occur in the native Toll-like Receptor agonist, whereby the Toll-like Receptor agonist component activates a Toll-like Receptor.

[0020] In an additional embodiment, the invention is a composition comprising a flagellin component that is at least a portion of a flagellin, wherein at least one lysine of the flagellin component has been substituted with at least one arginine, whereby the flagellin component activates a Toll-like Receptor 5.

[0021] In yet another embodiment, the invention is a composition comprising a flagellin component that is at least a portion of a flagellin, wherein at least one lysine of the flagellin component has been substituted with at least one serine residue, whereby the flagellin component activates a Toll-like Receptor 5.

[0022] Another embodiment of the invention is a composition comprising a flagellin component that is at least a portion of a flagellin, wherein at least one lysine of the flagellin component has been substituted with at least one histidine residue, whereby the flagellin component activates a Toll-like Receptor 5.

[0023] A further embodiment of the invention is a method of stimulating an immune response in a subject, comprising the step of administering to the subject a composition that includes a flagellin component that is at least a portion of a flagellin, wherein the flagellin component includes at least one cysteine residue and whereby the flagellin component activates a Toll-like Receptor 5.

[0024] In still another embodiment, the invention is a method of stimulating an immune response in a subject, comprising the step of administering to the subject a composition that includes a flagellin component that is at least a portion of a flagellin, wherein at least one lysine of the flagellin component has been substituted with at least one arginine, whereby the flagellin component activates a Toll-like Receptor 5.

[0025] An additional embodiment of the invention is a method of stimulating an immune response in a subject, comprising the step of administering to the subject a composition that includes a flagellin component that is at least a portion of a flagellin, wherein at least one lysine of the flagellin component has been substituted with at least one serine residue, whereby the flagellin component activates a Toll-like Receptor 5.

[0026] In another embodiment, the invention is a method of stimulating an immune response in a subject, comprising the step of administering to the subject a composition that includes a flagellin component that is at least a portion of a flagellin, wherein at least one lysine of the flagellin component has been substituted with at least one histidine residue, whereby the flagellin component activates a Toll-like Receptor 5.

[0027] In yet another embodiment, the invention is a method of stimulating an immune response in a subject, comprising the step of administering to the subject a composition that includes a Toll-like Receptor agonist component that is at least a portion of a Toll-like Receptor agonist, wherein the Toll-like Receptor agonist component includes at least one cysteine residue in a position where a cysteine residue does not occur in the native Toll-like Receptor agonist, whereby the Toll-like Receptor agonist component activates a Toll-like Receptor agonist.

[0028] The methods and composition of the invention can be employed to stimulate an immune response, in particular, a protective immune response, in a subject. Advantages of the claimed invention include, for example, cost effective methods and compositions that can be produced in relatively large quantities for use in the prevention and treatment of disease associated with viral influenza infection. The claimed methods and compositions can be employed to prevent or treat viral influenza infection and, therefore, avoid serious illness and death consequent to viral influenza infection.

### BRIEF DESCRIPTION OF THE FIGURES

[0029] FIG. 1 depicts a ribbon diagram of PR8 influenza A hemagglutin (HA) crystal structure (1RU7). Schematically presentations from left to right are HA trimer, monomer, the globular head domain and the three choices of vaccine candidates. Molecules or domains of interest are highlighted by dotted circle, such as the monomer in trimer structure and the globular head domain within the monomer structure. The domain boundaries of three vaccine candidates are marked by the cross signs. The residue numbers of each selection are also labeled in the individual vaccine presentation.

[0030] FIG. 2 depicts a hydrophobicity plot analysis of the B/Lee/40 HA (SEQ ID NO: 36) using ProtScale (http://ca.expasy.org/tools→Primary structure analysis→ProtScale) to confirm that the selected boundaries were in the hydrophilic regions of the protein.

[0031] FIG. 3 depicts a sandwich ELISA analysis of STF2.HA B strain proteins. ELISA plates were coated with antibody to flagellin, and the indicated proteins were incubated to allow capture. Proteins were detected using ferret antisera against B/Malaysia/2506/2004 and enzyme-labeled goat anti-ferret antibodies.

[0032] FIG. 4 depicts the TLR bioactivity of STF2.HA B strain proteins. HEK293 (TLR5+) cells were incubated with the indicated proteins overnight, and the cell culture supernatants were harvested and assessed for IL-8 by ELISA.

[0033] FIG. 5 depicts the TLR bioactivity of STF2.HA B strain proteins. HEK293

[0034] (TLR5+) cells were incubated with the indicated proteins overnight, and the cell culture supernatants were harvested and assessed for IL-8 by ELISA.

[0035] FIG. 6 depicts the dose-dependent antibody response to STF2.HA1-2(PR8) (SEQ ID NO: 90) in BALB/c mice. Mice (10/group) were immunized as indicated on days 0 and 14, and bled on days 12 and 21. Anti-HA IgG responses on Day 28 were examined by ELISA. Convalescent antisera (x) were included as a positive control. The data depict the mean±SD of 10 individual sera per group.

[0036] FIG. 7 depicts serum reactivity with influenza infected cells in vitro. The day 21 serum samples depicted in FIG. 6 were incubated with mock- and PR/8/34-infected MDCK cells. The data represent the OD₄₅₀ mean±SD of 10 individual sera/group.

[0037] FIG. 8A depicts survival of BALB/c mice immunized with STF2.HA1-2(PR8) (SEQ ID NO: 90). Mice from FIGS. 8 and 9 were challenged on day 28 with an LD₉₀ (8×10³ EID) of influenza A PR/8/34 administered intranasally (Day 0 post-challenge).

[0038] FIG. 8B depicts weights of BALB/c mice immunized with STF2.HA1-2(PR8) (SEQ ID NO: 90). Mice from FIGS. 6 and 7 were challenged on day 28 with an LD₉₀ (8×10³ EID) of influenza A PR/8/34 administered intranasally (Day 0 post-challenge). Graph reflects the average weight per group based on individual animals measured daily for 19 days.

[0039] FIG. 8C depicts clinical Score of BALB/c mice immunized with STF2.HA1-2(PR8) (SEQ ID: NO 90). Mice from FIGS. 6 and 7 were challenged on day 28 with an LD₉₀ (8×10³ EID) of influenza A PR/8/34 administered intranasally (Day 0 post-challenge). Graph reflects the average clinical score per group based on individual animals measured daily for 19 days. Clinical scores were assessed as follows: 4 pts=healthy, 3 pts=reduced grooming, 2 pts=reduced physical activity and 1 pt=moribund.

[0040] FIG. 9 depicts neutralization activity of immune sera from BALB/c mice immunized with the indicated doses of STF2.HA1-2(PR8) (SEQ ID NO: 90) on days 0 and 14, and bled on day 21. The endpoint titer of each sample was calculated as the titer that inhibited virus-mediated lysis of the cells by at least 50%. Geometric mean titers±SD were calculated for each dose group and plotted.

[0041] FIGS. 10A and 10B depict anti-HA antibody response of BALB/c mice immunized with 3 μg of STF2.HA1-2(PR8) (SEQ ID NO: 90), or 3 or 0.3 μg of STF2.HA1-2(VN) (SEQ ID NO: 95) s.c. on days 0 and 14. On day 21, sera were isolated and examined for reactivity with (FIG. 10A) HA purified from Influenza A/Viet Nam/1203/2004 (obtained from BEI Resources Cat# NR-660)) and (FIG. 10B) recombinant flagellin (STF2) (SEQ ID NO: 96) by ELISA.

[0042] FIG. 11 depicts a flow chart of the steps required to express pFastBac constructs using Bac-to-Bac Baculovirus Expression system.

[0043] FIGS. 12A and 12B depict an anti-HA specific IgG responses in BALB/c mice immunized with STF2.HA1-1 fusion proteins. Mice (10/group) were immunized with indicated STF2.HA1-1 fusion proteins on days 0 and 14, and bled on day 21. Anti-HA and anti-flagellin IgG responses were examined by ELISA. Convalescent antisera were included as a positive control. The data depict the mean±SD of 10 individual sera per group.

[0044] FIG. 13A depicts survival of BALB/c mice immunized with recombinant STF2.HA1-1 proteins. On day 28, animals in FIG. 12 were challenged i.n. with an LD₉₀ (8×10³ EID) of influenza A PR/8/34. The survival of individual mice was monitored for 21 days post challenge.

[0045] FIG. 13B depicts weight of BALB/c mice immunized with recombinant STF2.HA1-1 proteins. On day 28, animals in FIG. 12 were challenged i.n. with an LD₉₀ (8×10³ EID) of influenza A PR/8/34. Graph reflects the average weight per group based on individual animals measured daily for 21 days.

[0046] FIG. 13C depicts clinical assessment of BALB/c mice immunized with recombinant STF2.HA1-1 proteins. On day 28, animals in FIG. 12 were challenged intranasally (i.n.) with an LD₉₀ (8×10³ EID) of influenza A PR/8/34. Graph reflects the average weight per group based on individual animals measured daily for 21 days. Clinical scores were assessed as follows: 4 pts=healthy, 3 pts=reduced grooming, 2 pts=reduced physical activity and 1 pt=moribund.

[0047] FIG. 14 depicts anti-HA antibody titers of mice following immunization with 10 μg STF2.HA1-2(VN).

[0048] FIG. 15 depicts an anti-HA antibody titers of mice following immunization with 3 μg STF2.HA1-2(VN).

[0049] FIG. 16 depicts an anti-HA antibody titers of mice following immunization with 1 μg STF2.HA1-2(VN).

[0050] FIG. 17 depicts a survival of mice following challenge with 10 LD₉₀ of influenza A/Viet Nam/1203/04

[0051] FIG. 18 depicts the amino acid sequence of full-length flagellin (STF2) highlighting important domains and residues. [symbol] =experimentally-defined TLR5 binding site (Smith, et al., 2003); [symbol] =lysine residues; underline=flagellin sequences corresponding to STF2Δ construct (linker not shown).

[0052] FIG. 19 depicts a space-filling model of flagellin (STF2) with the TLR5 activation site (left panel) and lysine residues (right panel) highlighted in gray.

[0053] FIG. 20 depicts a space-filling model of flagellin (STF2) with residues retained in STF2Δ highlighted in black.

[0054] FIG. 21 depicts a schematic depiction of the two-step PCR cloning of pMT/STF2Δ.

[0055] FIG. 22 depicts recognition of flagellin epitopes of STFΔ proteins in ELISA.

[0056] FIG. 23 depicts TLR5-dependent secretion of IL-8 following stimulation of HEK293 cells with the indicated STF2Δ proteins.

[0057] FIG. 24 depicts the 5200 chromatogram of STF2Δ.HingeCys:CysH1C1. Void=column void volume; conjugate=elution peak of protein: peptide conjugate; A260, A280 and conductivity are indicated.

[0058] FIG. 25 depicts TLR5-dependent secretion of IL-8 following stimulation of RAWhTLR5 cells (closed symbols) or TLR5-negative RAW cells (open symbols) with STF2Δ.HingeCys (squares), STF2Δ.HingeCys:CysH1C1 conjugate (circles), or STF2.OVA (triangles).

[0059] FIG. 26 depicts the 5200 chromatogram of STF2.4×H1C1. Void=column void volume; conjugate=elution peak of protein: peptide conjugate; A260, A280 and conductivity are indicated.

[0060] FIG. 27 depicts an anti-H1C1 antibody response of BALB/c mice immunized with native H1C1 peptide or Pam3Cys.H1C1 peptide.

[0061] FIG. 28 depicts a survival plot of BALB/c mice immunized with native H1C1 peptide or Pam3Cys.H1C1 peptide then challenged with an LD₉₀ of influenza A/Puerto Rico/8/34 virus.

[0062] FIG. 29 depicts the amino acid sequence of Salmonella typhimurium flagellin type 2 (fljB/STF2) with the hinge region underlined (SEQ ID NO: 312).

[0063] FIG. 30 depicts the nucleic acid sequence (SEQ ID NO: 498) encoding SEQ ID NO: 312. The nucleic acid sequence encoding the hinge region is underlined.

[0064] FIG. 31 depicts the amino acid sequence of fljB/STF2 without the hinge region (also referred to herein as “fljB/STF2Δ” or “STF2Δ”) (SEQ ID NO: 499).

[0065] FIG. 32 depicts the nucleic acid sequence (SEQ ID NO: 500) encoding SEQ ID NO: 499.

[0066] FIG. 33 depicts the amino acid sequence of E. coli flagellin fliC (also referred to herein as “E. coli fliC”) with the hinge region underlined (SEQ ID NO: 501).

[0067] FIG. 34 depicts the nucleic acid sequence (SEQ ID NO: 502) encoding SEQ ID NO: 501. The nucleic acid sequence encoding the hinge region is underlined.

[0068] FIG. 35 depicts the amino acid sequence of S. muenchen flagellin fliC (also referred to herein as “S. muenchen fliC”) with the hinge region underlined (SEQ ID NO: 503).

[0069] FIG. 36 depicts the nucleic acid sequence (SEQ ID NO: 504) encoding SEQ ID NO: 503. The nucleic acid sequence encoding the hinge region is underlined.

[0070] FIG. 37 depicts the amino acid sequence of pMT/STF2. The linker is underlined and the sequence of the BiP secretion signal is bolded (SEQ ID NO: 505).

[0071] FIG. 38 depicts the nucleic acid sequence (SEQ ID NO: 506) of SEQ ID NO: 505. The nucleic acid sequence encoding the linker is underlined and the nucleic acid sequence encoding the BiP sequence is bolded.

[0072] FIG. 39 depicts a Pam3Cys.M2e fusion protein. The amino acid sequence (SEQ ID NO: 509) of M2e is shown in bold type.

[0073] FIG. 40 depicts the activation of an antigen-presenting cell (APC) by Toll-like Receptor (TLR) signaling.

[0074] FIGS. 41A and 41B depict plasmid constructs to express an amino-terminus of an M2 (e.g., SEQ ID NOS: 509, 553) of H1 and H5 (SEQ ID NO: 535) influenza A viral isolates. pMT: metallothionein promoter-based expression vector. BiP: secretion signal sequence of immunoglobulin-binding protein. STF2: full-length flagellin of S. typhimurium. STF2Δ: hinge region-deleted STF2. MCS: multiple cloning site.

[0075] FIG. 42 depicts plasmid constructs designed to express HA of H1 and H5 influenza A virus isolates. AOX1: AOX1 promoter of pPICZα expression vector (Invitrogen Corporation, Carlsbad, Calif.). αf: secretion signal sequence of yeast. STF2: full-length flagellin of S. typhimurium. STF2Δ: hinge region-deleted STF2. MCS: multiple cloning site.

[0076] FIG. 43 depicts the amino acid sequence (SEQ ID NO: 560) of HA (PR8).

[0077] FIG. 44 depicts the nucleic acid sequence (SEQ ID NO: 561) encoding SEQ ID NO: 560.

[0078] FIG. 45 depicts the amino acid sequence (SEQ ID NO: 562) of E. coli fliC without the hinge region.

[0079] FIG. 46 depicts the amino acid sequence of pMT/STF2Δ (SEQ ID NO: 584). The linker sequence is underlined and the BiP secretion signal is bolded.

[0080] FIG. 47 depicts the nucleic acid sequence (SEQ ID NO: 585) encoding SEQ ID NO: 584. The nucleic acid sequence encoding the linker is underlined and the nucleic acid sequence encoding the BiP secretion signal is bolded.

[0081] FIG. 48 depicts the amino acid sequence (SEQ ID NO: 594) of the Salmonella muenchen fliC without the hinge region, which is also referred to herein as “S. muenchen fliCΔ.”

[0082] FIG. 49 depicts the nucleic acid sequence of Salmonella muenchen fliC (SEQ ID NO: 595) encoding SEQ ID NO: 594.

[0083] FIG. 50 depicts IL-8 secretion following stimulation of TLR5+ cells.

[0084] FIG. 51 depicts TNF secretion following stimulation of TLR2+ cells.

[0085] FIG. 52 depicts M2e-specific IgG.

[0086] FIG. 53 depicts the OVA-specific IgG.

[0087] FIG. 54 depicts the M2e-specific IgG serum titers.

[0088] FIG. 55 depicts the M2e-specific serum IgG titer post-boost.

[0089] FIG. 56 depicts the Pam3Cys.M2e dose response.

[0090] FIG. 57 depicts the M2e-specific serum IgG titer.

[0091] FIG. 58 depicts the rabbit IgG response to M2e.

[0092] FIG. 59 depicts the immunogenicity of STF2.4×M2e in a rabbit 14 days post-prime.

[0093] FIG. 60 depicts the survival of BALB1c mice following challenge. Mice were immunized on days 0 and 14 as indicated in the legend and challenged on day 28 by intranasal administration of an LD₉₀ of influenza A/Puerto Rico/8/34 virus (Day 0 post-challenge). Mice were monitored for survival for 21 days post-challenge.

[0094] FIG. 61 depicts fusion constructs in a pET24 vector. T7:T7 promoter; lacO: lac operator; STF2: Salmonella typhimurium flagellin; STF2Δ=STF2 with the hinge region deleted; EIII⁺ is domain III of a West Nile envelope protein with 6 amino acids of domain I amino acid.

[0095] FIGS. 62A and 62B depict TLR5 bioactivity of STF2.EIII+ (SEQ ID NOS: 655, 656) and STF2ΔEIII+ (SEQ ID NOS: 671, 672) fusion proteins. Serial dilutions of purified proteins were added to HEK293 (TLR5+) cells overnight and IL-8 content of the supernatants measured by ELISA. Purified STF2.OVA was used as a positive control (FIG. 129A). The TLR2 agonist Pam3CSK4 was used as a negative control (FIG. 129B).

[0096] FIG. 63 depicts STF2Δ.EIII+ antigenic epitopes assessed by ELISA. Plates were coated with full-length WNE (open bars) (SEQ ID NO: 640) or STF2Δ.EIII+ (SEQ ID NOS: 671, 672) and probed with the indicated antibodies (mAb). Poly=polyclonal antiserum to WNE; 3D9 through 7H2=neutralizing monoclonal antibodies to WNE epitopes; anti-flagellin=monoclonal antibody to flagellin.

[0097] FIGS. 64A, 64B, 64C and 64D depict reactivity of STF2.E (SEQ ID NOS: 759, 760); STF2.EIII+ (SEQ ID NOS: 655, 656) and STF2Δ.EIII+ (SEQ ID NOS: 671, 672) fusion proteins with antibodies to WNE and flagellin. Plates were coated with fusion proteins, blocked and incubated with antibodies to WNE or flagellin. Antibody reactivity was detected following incubation with HRP-labeled species specific IgG. Plates were developed in the presence of TMB substrate and O.D. 450/650 using a TECAN plate reader and Magellian software.

[0098] FIG. 65 depicts IgG serum following injection with fusion proteins. Mice were immunized with either PBS, Drosophila conditioned medium containing STF2.E (CM, positive control), 25 μg of STF2Δ.EIII+ (SEQ ID NOS: 671, 672) i.p., 25 μg STF2Δ.EIII+ s.c., 25 μg STF2.EIII+ (SEQ ID NO: 657, 656) i.p., 25 μg STF2.EIII+ (SEQ ID NOS: 655, 656) or 25 μg STF2.E (SEQ ID NOS: 759, 760). On day 35, immunized animals were challenged with WNV. Sera from individual mice (day 35) were characterized by direct ELISA to determine IgG levels. Purified WNV-E protein (SEQ ID NO: 640) was used as the antigen in this assay. This antigen (60) was produced in Drosophila as a his-tagged protein.

[0099] FIG. 66 depicts STF2Δ.EIII+ (SEQ ID NOS: 671, 672) and STF2.EIII+ (SEQ ID NOS: 655, 656) protective immunity to WNV viral challenge. Mice were immunized and challenged with a lethal dose of WNV strain 2741 on day 35. Survival was monitored for 21 days.

[0100] FIG. 67 depicts IgG sera titers following immunization with fusion proteins. STF2Δ.EIII+ proteins induce WNV-specific IgG antibodies. Mice were immunized s.c. on days 0, 14 and 28 with PBS alone or about 25 μg of STF2Δ.EIII+ (SEQ ID NOS: 671, 672) (045 [positive control]), STF2Δ.EIII+ (067, trimer), STF2Δ.EIII+ (070, monomer) or STF2Δ.EIIIs+ (SEQ ID NOS: 673, 674) (069). On day 35 sera from individual mice were characterized by direct ELISA to determine IgG levels. Purified WNV-E protein (060, produced in Drosophila as a his-tagged protein) was used as the antigen in this assay.

[0101] FIG. 68 depicts STF2Δ.EIII+ (SEQ ID NOS: 671, 672) and STF2Δ.EIIIs+ (SEQ ID NOS: 673, 671) protective immunity in mice from WNV lethal challenge. On day 38 following immunization with fusion proteins, all groups were challenged with a lethal dose of WNV strain 2741 and survival was monitored for 21 days. Survival for each group (10 mice/group) is indicated as a percentage.

[0102] FIG. 69 depicts competition assays. Serial dilutions (five fold starting at 1:25) of antisera from immunized animals were incubated with biotinylated WNE protein (SEQ ID NO: 640) and then added to the wells of ELISA plates coated with mAb 7H2 at about 2 mg/ml. Wells were developed using avidin-HRP to determine inhibition of West Nile protein binding as a results of competition with mAb 7H2.

[0103] FIG. 70 depicts epitope mapping of the antibody response induced by STF2Δ.EIII+ (SEQ ID NOS: 673, 674) fusion proteins. Immune sera from animals immunized with indicated STF2Δ-fusion proteins (E2-21, E27-E52, FIG. 142) were examined for the ability to recognize overlapping peptides corresponding to the junction of domains I and III of the WNV envelope protein.

[0104] FIG. 71 depicts epitope mapping of the antibody response induced by STFΔ.EIIIs+ (SEQ ID NOS: 673, 674) E-21 (envelope protein) epitope fusion proteins. Immune sera from animals immunized with the indicated STF2Δ-fusion proteins (E2-21, E2-21-1(S,C), E2-21-2(C,S), E2-21-2(C,S) and E2-21-4 through E2-21-24, see FIG. 139) were evaluated to identify the residues defining the E-21 epitope of West Nile envelope protein. Data reflects the response of sera to E-21 following the substitution of cysteine with serine (indicated by C,S); and the sequential replacement of amino acids with alanine. The peptides tested are listed in FIG. 139.

[0105] FIG. 72 depicts Pam3Cys.WNV001 (SEQ ID NO: 769) inducing EIII specific IgG antibodies. Mice were immunized s.c. on days 0, 14 and 28 with PBS alone, 22 mg of unmodified WNV001 (SEQ ID NO: 769) or 30 μg of Pam3Cys.WNV001. On day 35 sera from individual mice were characterized by direct ELISA to determine IgG levels to synthetic WNV001 peptide.

[0106] FIG. 73 depicts the amino acid sequences (SEQ ID NOS: 689, 696) of the EI/EIII junction for West Nile, Japanese encephalitis and Dengue (serotypes 1 through 4) viruses. The West Nile epitope identified using antisera from STF2Δ.EIIIs+ immunized animals is underlined. This sequence corresponds to peptide E2-21 (SEQ ID NO: 726).

[0107] FIG. 74 depicts a tripalmitoylated peptide that includes CSSN (SEQ ID NO: 839).

[0108] FIG. 75 depicts the D1 domain, D2 domain, TLR5 activation domain and hypervariable (D3 domain) of flagellin.

[0109] FIG. 76 depicts the D1 domain, D2 domain, TLR5 activation domain and hypervariable (D3 domain) of flagellin (Yonekura, et al. Nature 424, 643-650 (2003)).

[0110] FIG. 77 depicts the D0, D1, D2 and D3 domains of flagellin and regions in the D2 and D3 domains suitable for insertion or substitution with antigens (e.g., maturational cleavage site, HA, M2e).

[0111] FIG. 78 depicts the amino acid sequence of Pseudomonas aeruginosa flagellin (SEQ ID NO: 813). Lysine residues are indicated by the asterisks.

[0112] FIG. 79 depicts the amino acid sequence of a S. typhimurium flagellin (SEQ ID NO: 312). Lysine residues are indicated by the asterisks.

[0113] FIG. 80 depicts the amino acid sequence (SEQ ID NO: 817) of Listeria monocytogenes flagellin (GenBank Accession No: Q92DW3). Lysine residues are indicated by the asterisks.

### DETAILED DESCRIPTION OF THE INVENTION

[0114] The features and other details of the invention, either as steps of the invention or as combinations of parts of the invention, will now be more particularly described and pointed out in the claims. It will be understood that the particular embodiments of the invention are shown by way of illustration and not as limitations of the invention. The principle features of this invention can be employed in various embodiments without departing from the scope of the invention.

[0115] The invention generally is directed to methods of making compositions, and to compositions, that stimulate an immune response in a subject, such as a protective immune response, and methods of treatment, such as by administering the composition to a subject.

[0116] “Stimulating an immune response,” as used herein, refers to the generation of antibodies and/or T-cells to at least a portion of an antigen, such as the protein portions of hemagglutinin (HA) (e.g., HA1-1, HA1-2 proteins) described herein. The antibodies and/or T-cells can be generated to at least a portion of an influenza viral protein (e.g., HA and M2 proteins of influenza A, B and/or C).

[0117] Stimulating an immune response in a subject can include the production of humoral and/or cellular immune responses that are reactive against the antigen, such as a viral protein, in particular, an influenza viral protein.

[0118] The compositions of the invention for use in methods to stimulate immune responses in subjects, can be evaluated for the ability to stimulate an immune response in a subject using well-established methods. Exemplary methods to determine whether the compositions of the invention stimulate an immune response in a subject, include measuring the production of antibodies specific to the antigen (e.g., IgG antibodies) by a suitable technique such as, ELISA assays; the potential to induce antibody-dependent enhancement (ADE) of a secondary infection; macrophage-like assays; neutralization assessed by using the Plaque Reduction Neutralization Test (PRNT₈₀); and the ability to generate serum antibodies in non-human models (e.g., mice, rabbits, monkeys) (Putnak, et al., Vaccine 23:4442-4452 (2005)).

[0119] “Stimulates a protective immune response,” as used herein, means administration of the compositions of the invention, such as hemagglutinin (HA) proteins (e.g., HA1-1, HA1-2 proteins described herein), results in production of antibodies to the protein to thereby cause a subject to survive challenge by an otherwise lethal dose of a viral protein, such as viral HA. Techniques to determine a lethal dose of a virus (e.g., an influenza virus) are known to one of skill in the art (see, for example, WHO/CDS/CSR/NCS2002.5 “WHO Manual on Animal Influenza Diagnosis and Surveillance” World Health Organization, Dept of Communicable Disease Surveillance and Response, WHO Global Influenza Programme; Harmon, M. W., et al., J. Clin. Microbiol. 26:333-337 (1988); Reed, L. J., et al., Am. J. Hyg. 27:493-497 (1938); Rose, T., et al., J. Clin. Microbiol. 37:937-943 (1999); Walls, H. H. et al., J. Clin. Microbiol. 23:240-245 (1986); Current Protocols in Immunology, 19.11.1-19.11.32, Cottey, R., et al., John Wiley & Sons, Inc (2001)). Exemplary techniques for determining a lethal dose can include administration of varying doses of virus and a determination of the percent of subjects that survive following administration of the dose of virus (e.g., LD₁₀, LD₂₀, LD₄₀, LD₅₀, LD₆₀, LD₇₀, LD₈₀, LD₉₀). For example, a lethal dose of a virus that results in the death of 50% of a population of subjects is referred to as an “LD₅₀”; a lethal dose of a virus that results in the death of 80% of a population of subjects is referred to herein as “LD₈₀”; a lethal dose of a virus that results in death of 90% of a population of subjects is referred to herein as “LD₉₀.”

[0120] For example, determination of the LD₉₀ can be conducted in subjects (e.g., mice) by administering intranasally varying doses (e.g., dilutions, such as log and half-log dilutions of 8×10³ egg-infectious doses (EID)) followed by an assessment of the survival of the subjects about 14 days to about 21 days after infection with the virus. Protective immunity can be assessed by physical appearance of the subject, general demeanor (active), weight (initial loss of weight followed by return to a weight about the weight of the subject prior to infection with the virus) and survival after about 14 to about 21 days following infection with the virus.

[0121] Assessment of stimulation of protective immunity can also be made by employing assays that assess the ability of the antibodies produced in response to the compositions of the invention (e.g., a portion of the protein of the naturally occurring virus, such as a protein portion of hemagglutinin) to neutralize binding of the viral protein (e.g., hemagglutinin protein) to a host cell (see, for example, Current Protocols in Immunonology, 19.11.1-19.11.32, Cottey, R., et al., John Wiley & Sons, Inc (2001)). Assessment of stimulation of protective immunity can also be made by employing assays that measure the ability of antibodies to inhibit hemagglutinin binding (see, for example, Burnett, F. M., et al., J. exp. Biol. Med. Sci. 25:227-233 (1947); Salk, J. E. J. Immunol. 49:87-98 (1944); Current Protocols in Immunology, 19.11.1-19.11.32, Cottey, R., et al., John Wiley & Sons, Inc (2001)).

[0122] It is believed that inhibition of hemagglutinin binding is indicative of the ability of antibodies, formed from the compositions and by the methods of the invention, to neutralize the sialic acid binding sites of the naturally occurring viral hemagglutinin (“neutralization of HA binding”) and, thereby, prevent infection of the host cell as a consequence of stimulating a protective immune response Inhibition or neutralization of hemagglutinin binding is believed to correlate with an ability of an immune response to protect against a lethal dose of virus.

[0123] Neutralization of HA binding can be assessed by in vitro assays (See, for example, Current Protocols in Immunology 19.11.1-19.11.32, Cottey, R., et al., Suppl. 42, John Wiley & Sons, Inc. (2001) and WHO Manual on Animal Influenza Diagnosis and Surveillance, Webster, R., et al., pages 28-36, 48-54, 82-92 (2002)). Exemplary viral neutralization assays rely on the ability of serum to specifically bind and prevent replication of influenza virus in culture, such as in the Madin-Darby Canine Kidney (MDCK) cell line. Briefly, cells are cultured in 96 well plates in the presence of a previously titered virus and the cytopathic effect of the replicating virus is observed under a microscope. To test serum, serial dilutions of the serum are prepared and preincubated with the viral stock for 2 hours at 37° C. prior to infecting the MDCK cells. The mixture is incubated for an additional 2 hours after which the virus/serum mixture is removed and replaced with fresh media. The cells are grown for 4 days. Wells are scored as positive for viral growth if at least about 50% of the cells are dead in at least about half of the wells for a given serum dilution. The reciprocal of the highest dilution of serum which protects at least about half of the cells from death, in at least about half of the wells, is considered the neutralization titer.

[0124] Alternatively, a micro-neutralization in vitro assay can be performed to assess neutralization of HA binding. For example, serum is diluted and preincubated with a known titer of virus and mixed with MDCK cells, as described above. After 2 days of incubation, cells are washed and fixed with acetone. The plates are developed as an ELISA using a monoclonal antibody to the influenza nuclear antigen NP. A microneutralization titer is determined as the reciprocal of the highest dilution which yields less than about 50% of the anti-NP reading of the virus-only control wells.

[0125] The Hemagglutination Inhibition (HAI) assay is based on the HA antigen on the surface of the influenza virus agglutinating red blood cells (RBC) and preventing red blood cells from precipitating. Antibodies that specifically bind the sialic acid-binding regions of HA prevent agglutination allowing precipitation. The assay is performed in 96 well V bottom plates with fresh chicken RBC. A stock of viral antigen is titered so that about a 4-fold excess of antigen is present relative to the minimum amount needed to prevent precipitation. The test serum, which can be from several species including mouse, ferret, poultry or human, is heated to about 56° C. to inactivate complement. Serial 2-fold dilutions of the inactivated serum are performed and mixed with the stock HA. After about 30 minutes at room temperature, the RBCs are added and the plate is incubated for about 30 to about 45 minutes. Results are scored by observations: agglutination results in cloudy wells while inhibition results in a “button” of red cells precipitated at the bottom of the well. Controls include RBC with no HA, which forms a button, and HA and RBC with no serum, which remains cloudy. The HAI titer of a particular serum sample is the reciprocal of the last dilution which prevents agglutination (i.e., forms a button). For example, if about a 1:128 dilution reads as a button but the 1:256 dilution does not, the HAI titer is about 128.

[0126] In one embodiment, the invention is a method of making a protein that stimulates a protective immune response in a subject, comprising the steps of separating a portion of a protein from a naturally occurring viral hemagglutinin to thereby make a protein portion, wherein the protein portion includes at least a portion of a globular head and at least a portion of at least one secondary structure that causes the globular head to essentially retain its tertiary structure, and wherein the protein portion lacks a membrane fusion domain, a transmembrane domain and a cytoplasmic domain. The nucleic acid sequence encoding the protein portion is transformed into a prokaryotic cell and the prokaryotic host cell is cultured to thereby make the protein that stimulates a protective immune response in a subject.

[0127] “A portion of a protein,” or “protein portion,” as used herein in reference to a naturally occurring viral hemagglutinin, refers to any part of the naturally occurring viral hemagglutinin that is less than the entire naturally occurring viral hemagglutinin. “Naturally occurring viral hemagglutinin,” as used herein, refers to the entire viral hemagglutinin, as it occurs in nature.

[0128] The protein portion can further lack a signal sequence. The protein portion can further include a sialic acid binding site.

[0129] Portions of a protein of a naturally occurring viral hemagglutinin for use in the compositions and methods of the invention can be a portion of Orthomyxoviridae (influenza A, B, C), Paramyxovirus (parainfluenza, respiratory syncytial virus, Newcastle disease virus, Nipah, Measles, canine distemper, Sendai virus), Reoviridae (rotavirus), Parvoviridae (human parvovirus, porcine parvovirus), Orthopoxvirus (Monkeypox virus, Ectromelia virus), Flaviviridae (West Nile, Japanese Encephalitis, St. Louis, Murray Valley, Kunjin), Avipoxvirus (Chicken fowlpox), Nipah virus (Guillaume V., et al., J. Virol., 80:7546-54 (2006)); Canine distemper virus (Singethan K., et al., J Gen Virol., 87:1635-42 (2006)); Newcastle disease virus, (de Leeuw O, S., et al., J Gen Virol., 86:1759-69 (2005); and Melanson V. R., et al., J. Virol., 78:13053-61 (2004); Deng R., et al., Virology, 204:17-26; (1994)), Measles (Masse N., et al., J. Virol., 78:9051-63 (2004)), Sendai virus (Tomasi M., et al., FEBS Lett., 11:56-60 (2003)), Human parainfluenza (Porotto M., et al., J. Virol., 79:2383-92 (2005); Tsurudome M., et al., Virology, 213:190-203 (1995); Bousse T., et al., Virology, 209:654-7 (1995); and Takimoto T., et al., J. Virol., 66:7597-600 (1992)).

[0130] Portions of a viral hemagglutinin (“protein portions”) (e.g., an influenza A, an influenza B and an influenza C viral hemagglutinin) can include at least one member selected from the group consisting of protein portions referred to herein as “HA1-1,” “HA1-2” and “HA1-3.”

[0131] “HA1-1,” as used herein, refers to a protein portion of a viral hemagglutinin that includes at least about one β-sandwich that includes the substrate binding site, which includes at least about two β-sheets, at least about two to about three short α-helixes, at least one small β-sheet and at least one additional small β-sandwich at the bottom of the molecule and at least about four disulfide bonds. The β-sandwich that includes the substrate binding site of the HA1-1 includes at least about four β-strands as the top sheet and at least about three to about four β-strands as the bottom sheet. At least about one α-helix of the HA1-1 portion is located by the side of β-sandwich that includes the substrate binding site and at least about one to about two are located at the bottom of the β-sandwich that includes the substrate binding site. The small β-sandwich of the HA1-1 can include at least about two to about three β-strands in each β-sheet; or about three to about four β-strands. Exemplary HA1-1 protein portions could include SEQ ID NOS: 8, 11, 14, 17, 20, 38, 40, 45, 47, 49, 59, 60, 120, 130, 132, 133, 137, 139, 143, 147, 179, 180, 181 and 182.

[0132] “HA1-2,” as used herein, refers to a protein portion of a viral hemagglutinin that includes at least about one β-sandwich that includes the substrate binding site, at least about two to about three short α-helixes, at least about one small β-sheet at the bottom of the molecule and at least about two disulfide bonds. A β-strand in a viral hemagglutinin can include between about two to about 15 amino acids. A small β-strand can include about two amino acids; or between about two to about three amino acids; or between about two to four amino acids or between about two to about five amino acids. A small β-sheet can include between about two to about three β-strands; or between about three to about four β-strands. The β-sandwich that includes the substrate binding site of HA1-2 can further include at least about four β-strands as the top sheet and at least about three to about four β-strands as the bottom sheet. At least about one α-helix of the HA1-2 portion is located by the side of the β-sandwich that includes the substrate binding site and at least about one to about two are located at the bottom of the β-sandwich that includes the substrate binding site. Exemplary HA1-2 protein portions could include SEQ ID NOS: 9, 12, 15, 18, 21, 24, 26, 28, 30, 32, 39, 41, 46, 48, 50, 61, 72, 79, 88, 93, 122, 124, 185, 187, 189, and 191.

[0133] “HA1-3,” as used herein, refers to a protein portion of a viral hemagglutinin that includes at least one β-sandwich that includes the substrate binding site, at least about two short α-helixes and at least one disulfide bond. “β-sandwich,” as used herein, refers to at least about two sets of beta-sheets that form at least about one interactive layer. “Substrate binding site,” as used herein in reference to the β-sandwich, means any part of the portion of the naturally occurring viral hemagglutinin that has the capacity to interact or bind to a molecule. For example, the β-sandwich that includes the substrate binding site of the portion can include a portion that binds sialic acid. The β-sandwich that includes the substrate binding site of HA1-3 can further include at least about four β-strands as the top sheet and at least about three β strands as the bottom sheet. At least about one α-helix of the HA1-1 portion is located by the side of the β-sandwich that includes the substrate binding site and at least one other α-helix is located at the bottom of the β-sandwich that includes the substrate binding site. A short α-helix can include less than about 5 turns (2, 3, 4, 5 turns) in an α-helix. An α-helix in a viral hemagglutinin can be between one to about 15 turns; or between about two to 15 turns. Exemplary HA1-3 protein portions include SEQ ID NOS: 10, 13, 16, 19, 22, 25, 27, 29, 31 and 33.

[0134] “A sialic acid binding site,” as that phrase is used herein in reference to the portion of the protein from the naturally occurring viral hemagglutinin, means a part of the protein portion that has the capacity to interact with sialic acid residues. “A sialic acid binding site” is also referred to herein as “a sialic acid binding domain.” HA proteins and portions of HA proteins for use in the invention can include portions of SEQ ID NOs: 1-7, 23, 34-37, 42-44, 75, 83, 213 and 787.

[0135] “At least a portion,” as used herein, refers to any part of a component (e.g., a globular head, a secondary structure) or molecule (e.g., a protein, antigen, Toll-like Receptor, a peptide, flagellin, HA, matrix 2 protein (M2), matrix 2 ectodomain (M2e)); or the entirety of the component or the molecule. “At least a portion,” is also referred to herein as a “fragment.”

[0136] “At least a portion,” as used herein in reference to a flagellin (e.g., fljB/STF2, E. coli fliC, S. muenchen fliC), refers to any part of the flagellin (e.g., motif C; motif N; domain 1, 2, 3) or the entirety of the flagellin that can initiate an intracellular signal transduction pathway for a Toll-like Receptor.

[0137] A single polypeptide can exhibit several types of secondary structure. Without any stabilizing interactions, a polypeptide can assume a random-coil conformation. However, secondary structures, such as alpha(α)-helices and beta(β)-strands, can stabilize a protein or a portion of a protein. Lateral association of β-strands form β-sheets (also referred to herein as “β-pleated sheets”). Secondary structures can be located at the surfaces of the portion, the protein, or the naturally occurring protein (e.g., viral hemagglutinin, flagellin, M2e). A tertiary structure of a protein is the three-dimensional arrangement of amino acid residues. In contrast to secondary structure, which is stabilized by, for example, hydrogen bonds, α-helices, β-strands, tertiary structure results from hydrophobic interactions between non-polar side chains of the portion, protein or naturally occurring viral hemagglutinin. The hydrophobic interactions hold the helices strands in random coils in a compact internal scaffold. The size and shape of a protein can depend on its primary amino acid sequence, as well as the number, size and arrangement of secondary structures.

[0138] “A globular head,” as that phrase is used herein, refers to a portion of a protein of a naturally occurring viral hemagglutinin that includes the receptor or sialic acid binding regions. “Globular head,” is also referred to herein as a “globular domain.” The globular head of viral hemagglutinin proteins has been determined based on x-ray crystallography as described, for example, by Wilson I. A., et al. Nature 289:366-373 (1981); Chen, J., et al., Cell 95:409-417 (1998); Ha Y., et al., The EMBO Journal 21:865-875 (2002); Russell, R. J., et al., Virology 325:287-296 (2004); and Cox, N. J., et al., In: Toply and Wilson's Microbiology and Microbial Infections, eds. B W J Mathy, et al., Vol. 1 (9^{th} ed.) New York, N.Y., Oxford Univ. Press, Ch. 32, p. 634 (1998). The globular head of a naturally occurring viral hemagglutinin is a component of the HA1 subunit of, for example, influenza viral hemagglutinin. In addition to the receptor binding domain, the globular head can include the E⁻ subdomain and F⁻ subdomain as described, for example, by Ha, Y., et al. The EMBO Journal 21:865-875 (2002).

[0139] The phrase, “causes the globular head to essentially retain its tertiary structure,” as used herein, refers to maintenance of the tertiary structure of the globular head of the naturally occurring viral hemagglutinin sufficient to stimulate a protective immune response in a subject.

[0140] The membrane fusion domain of a viral hemagglutinin is that region of the viral hemagglutinin (involved in binding of the viral hemagglutinin) that binds a host cell. A transmembrane domain of the viral hemagglutinin is that portion of the viral hemagglutinin that spans the membrane of the virus. A cytoplasmic domain of a viral hemagglutinin is that portion of the viral hemagglutinin located on the cytoplasmic surface of the virus.

[0141] The portion of the protein of the naturally occurring viral hemagglutinin (also referred to herein as “protein portion”) can further lack a signal sequence. The portion of a globular head employed in the methods described herein can include at least a portion of at least one secondary structure that includes at least a portion of at least one β-pleated sheet; at least one alpha helix and/or at least one member selected from the group consisting of a salt bridge, a leucine zipper and a zinc finger. The portion of a globular head can further include at least about one disulfide bond, at least about two disulfide bonds, at least about three disulfide bonds, at least about four disulfide bonds, at least about five disulfide bonds and at least about six disulfide bonds.

[0142] The method of making a protein that stimulates a protective immune response in a subject can further include the step of substituting a nucleic acid sequence encoding at least one amino acid residue selected from the group consisting of a hydrophilic amino acid residue, a polar amino acid residue and a neutral amino acid residue for a nucleic acid sequence that encodes at least one hydrophobic amino acid residue in the protein portion. The hydrophobic amino acid residue substituted can include at least one member selected from the group consisting of a phenylalanine residue, a tryptophan residue and tyrosine residue. The polar amino acid residue substituted for the hydrophobic amino acid can include at least one member selected from the group consisting of an aspartic acid residue and a glutamic acid residue.

[0143] The portion of a protein of a naturally occurring viral hemagglutinin can be a portion of a naturally occurring influenza viral hemagglutinin protein (e.g., influenza A, B and C). The influenza A viral hemagglutinin protein can be at least one member selected from the group consisting of H1, H2, H3, H5, H7 and H9.

[0144] The host cell employed in the methods described herein can be a prokaryotic host cell. The prokaryotic host cell can be at least one member selected from the group consisting of an E. coli prokaryotic host cell, a Pseudomonas prokaryotic host cell, a Bacillus prokaryotic host cell, a Salmonella prokaryotic host cell and a P. fluorescens prokaryotic host cell.

[0145] The method of making a protein that stimulates a protective immune response in a subject can further include the step of transforming the prokaryotic host cell with a chaperone nucleic acid sequence. The chaperone nucleic acid sequence can be at least one member selected from the group consisting of a groES-groEL chaperone, a dnaK-dnaJ-grpE chaperone, a groES-groEL-tig chaperone and a tig chaperone.

[0146] The method of making a protein that stimulates a protective immune response in a subject can further include the step of fusing at least a portion of a Toll-like Receptor (TLR) agonist to the protein. The nucleic acid sequence encoding at least a portion of a Toll-like Receptor agonist can be operably linked to the nucleic acid sequence encoding the protein portion of the viral hemagglutinin. A linker (e.g., peptide linker) can be between the Toll-like Receptor agonist and the portion of the viral hemagglutinin.

[0147] Toll-like Receptors refer to a family of receptor proteins that are homologous to the Drosophila melangogaster Toll protein. Toll-like Receptors are type I transmembrane signaling receptor proteins characterized by an extracellular leucine-rich repeat domain and an intracellular domain homologous to an interleukin 1 receptor. Toll-like Receptors include TLR1, TLR2, TLR3, TLR4, TLR5, TLR6, TLR7, TLR 8, TLR9, TLR10, TLR11 and TLR12.

[0148] “Agonist,” as used herein in referring to a TLR, means a molecule that activates a TLR signaling pathway. A TLR signaling pathway is an intracellular signal transduction pathway employed by a particular TLR that can be activated by a TLR ligand or a TLR agonist. Common intracellular pathways are employed by TLRs and include, for example, NF-κB, Jun N-terminal kinase and mitogen-activated protein kinase. The Toll-like Receptor agonist can include at least one member selected from the group consisting of a TLR1 agonist, a TLR2 agonist (e.g., Pam3Cys, Pam2Cys, bacterial lipoprotein), a TLR3 agonist (e.g., dsRNA), a TLR4 agonist (e.g., bacterial lipopolysaccharide), a TLR5 agonist (e.g., a flagellin), a TLR6 agonist, a TLR7 agonist, a TLR8 agonist, a TLR9 agonist (e.g., unmethylated DNA motifs), TLR10 agonist, a TLR11 agonist and a TLR12 agonist.

[0149] The Toll-like Receptor agonists for use in the methods and compositions of the invention can be a Toll-like Receptor agonist component that is at least a portion of a Toll-like Receptor agonist, wherein the Toll-like Receptor agonist component includes at least one cysteine residue in a position where a cysteine does not occur in the native Toll-like Receptor agonist, whereby the Toll-like Receptor agonist component activates a Toll-like Receptor.

[0150] TLR4 ligands (e.g., TLR4 agonists) for use in the compositions and methods of the invention can include at least one member selected from the group consisting of SEQ ID NOS: 359-406 (see, PCT/US 2006/002906/WO 2006/083706; PCT/US 2006/003285/WO 2006/083792; PCT/US 2006/041865; PCT/US 2006/042051).

[0151] TLR2 ligands (e.g., TLR2 agonists) for use in the compositions and methods of the invention can also include at least one member selected from the group consisting of SEQ ID NOS: 455-494 (see, PCT/US 2006/002906/WO 2006/083706; PCT/US 2006/003285/WO 2006/083792; PCT/US 2006/041865; PCT/US 2006/042051).

[0152] The TLR2 ligand (e.g., TLR2 agonist) can also include at least a portion of at least one member selected from the group consisting of flagellin modification protein FlmB of Caulobacter crescentus; Bacterial Type III secretion system protein; invasin protein of Salmonella; Type 4 fimbrial biogenesis protein (PilX) of Pseudomonas; Salmonella SciJ protein; putative integral membrane protein of Streptomyces; membrane protein of Pseudomonas; adhesin of Bordetella pertusis; peptidase B of Vibrio cholerae; virulence sensor protein of Bordetella; putative integral membrane protein of Neisseria meningitidis; fusion of flagellar biosynthesis proteins FliR and FlhB of Clostridium; outer membrane protein (porin) of Acinetobacter; flagellar biosynthesis protein FlhF of Helicobacter; ompA related protein of Xanthomonas; omp2a porin of Brucella; putative porin/fimbrial assembly protein (LHrE) of Salmonella; wbdk of Salmonella; Glycosyltransferase involved in LPS biosynthesis; Salmonella putative permease.

[0153] The TLR2 ligand (e.g., TLR agonist) can include at least a portion of at least one member selected from the group consisting of lipoprotein/lipopeptides (a variety of pathogens); peptidoglycan (Gram-positive bacteria); lipoteichoic acid (Gram-positive bacteria); lipoarabinomannan (mycobacteria); a phenol-soluble modulin (Staphylococcus epidermidis); glycoinositolphospholipids (Trypanosoma Cruzi); glycolipids (Treponema maltophilum); porins (Neisseria); zymosan (fungi) and atypical LPS (Leptospira interrogans and Porphyromonas gingivalis).

[0154] The TLR2 ligand (e.g., TLR2 agonist) can also include at least one member selected from the group consisting of SEQ ID NOS: 495-497 (see, PCT/US 2006/002906/WO 2006/083706; PCT/US 2006/003285/WO 2006/083792; PCT/US 2006/041865; PCT/US 2006/042051).

| | |
|---|---|
| KGGVGPVRRSSRLRRTTQPG | (SEQ ID NO: 495) |
| GRRGLCRGCRTRGRIKQLQSAHK | (SEQ ID NO: 496) |
| RWGYHLRDRKYKGVRSHKGVPR | (SEQ ID NO: 497) |

[0155] The TLR2 agonist can include at least a portion of a bacterial lipoprotein (BLP).

[0156] The TLR2 agonist can be a bacterial lipoprotein, such as Pam2Cys (S-[2,3-bis(palmitoyloxy) propyl] cysteine), Pam3Cys ([Palmitoyl]-Cys((RS)-2,3-di(palmitoyloxy)-propyl cysteine) or Pseudomonas aeruginosa OprI lipoprotein (OprI). Exemplary OprI lipoproteins include SEQ ID NO: 780, encoded by SEQ ID NO: 781. An exemplary E. coli bacterial lipoprotein for use in the invention described herein is SEQ ID NO: 782 encoded by SEQ ID NO: 783. A bacterial lipoprotein that activates a TLR2 signaling pathway (a TLR2 agonist) is a bacterial protein that includes a palmitoleic acid (Omueti, K. O., et al., J. Biol. Chem. 280: 36616-36625 (2005)). For example, expression of SEQ ID NOS: 781 and 783 in bacterial expression systems (e.g., E. coli) results in the addition of a palmitoleic acid moiety to a cysteine residue of the resulting protein (e.g., SEQ ID NOS: 780 and 782) thereby generating a TLR2 agonist for use in the compositions, fusion proteins and polypeptides of the invention. Production of tripalmitoylated-lipoproteins (also referred to as triacyl-lipoproteins) in bacteria occurs through the addition of a diacylglycerol group to the sulfhydryl group of a cysteine (e.g., cysteine 21 of SEQ ID NO: 782) followed by cleavage of the signal sequence and addition of a third acyl chain to the free N-terminal group of the same cysteine (e.g., cysteine 21 of SEQ ID NO: 782) (Sankaran, K., et al., J. Biol. Chem. 269:19706 (1994)), to generate a tripalmitylated peptide (a TLR2 agonist) as shown, for example, in FIG. 74.

[0157] The Toll-like Receptor agonist in the compositions of the invention can further include at least one cysteine residue at the terminal amino acid of the amino-terminus and/or the terminal amino acid of the carboxy-terminus of the Toll-like Receptor agonist. For example, SEQ ID NO: 359 can further include at least one cysteine residue in a peptide bond to the amino-terminal glycine residue and/or at least one cysteine residue in a peptide bond to the carboxy-terminal glycine residue; SEQ ID NO: 360 can further include at least one cysteine residue in a peptide bond to the amino-terminal lysine residue and/or at least one cysteine residue in a peptide bond to the carboxy-terminal glycine residue; SEQ ID NO: 361 can further include at least one cysteine residue in a peptide bond to the amino-terminal glutamic acid residue and/or at least one cysteine residue in a peptide bond to the carboxy-terminal proline residue.

[0158] TLR5 agonists for use in the methods of the invention can include at least a portion of a flagellin. Flagellin are pathogen-associated molecular patterns (PAMPs) that activate TLR5.

[0159] The flagellin in the compositions and methods described herein can be at least a portion of a S. typhimurium flagellin (Genbank Accession Number AF045151); at least a portion of the S. typhimurium flagellin selected from the group consisting of SEQ ID NO: 312, SEQ ID NO: 810, SEQ ID NO: 312 and SEQ ID NO: 499; at least a portion of an S. muenchen flagellin (Genbank Accession Number AB028476) that includes at least a portion of SEQ ID NO: 503 and SEQ ID NO: 811; at least a portion of P. aeruginosa flagellin that includes at least a portion of SEQ ID NO: 813; at least a portion of a Listeria monocytogenes flagellin that includes at least a portion of SEQ ID NO: 817; at least a portion of an E. coli flagellin that includes at least a portion of SEQ ID NO: 501 and SEQ ID NO: 812; at least a portion of a Yersinia flagellin; and at least a portion of a Campylobacter flagellin.

[0160] The flagellin employed in the compositions of the invention can also include the polypeptides of SEQ ID NO: 312, SEQ ID NO: 499, SEQ ID NO: 503 and SEQ ID NO: 501; at least a portion of SEQ ID NO: 312, at least a portion of SEQ ID NO: 499, at least a portion of SEQ ID NO: 503 and at least a portion of SEQ ID NO: 501; and a polypeptide encoded by SEQ ID NO: 498, SEQ ID NO: 500, SEQ ID NO: 504 and SEQ ID NO: 502; or at least a portion of a polypeptide encoded by SEQ ID NO: 498, SEQ ID NO: 500, SEQ ID NO: 504 and SEQ ID NO: 502.

[0161] The flagellin employed in the compositions and method of the invention can lack at least a portion of a hinge region. Hinge regions are the hypervariable regions of a flagellin. Hinge regions of a flagellin are also referred to herein as “D3 domain or region,” “propellor domain or region,” “hypervariable domain or region” and “variable domain or region.” “Lack” of a hinge region of a flagellin, means that at least one amino acid or at least one nucleic acid codon encoding at least one amino acid that comprises the hinge region of a flagellin is absent in the flagellin. Examples of hinge regions include amino acids 176-415 of SEQ ID NO: 312, which are encoded by nucleic acids 528-1245 of SEQ ID NO: 498; amino acids 174-422 of SEQ ID NO: 501, which are encoded by nucleic acids 522-1266 of SEQ ID NO: 502; or amino acids 173-464 of SEQ ID NO: 503, which are encoded by nucleic acids 519-1392 of SEQ ID NO: 505. Thus, if amino acids 176-415 were absent from the flagellin of SEQ ID NO: 312, the flagellin would lack a hinge region. A flagellin lacking at least a portion of a hinge region is also referred to herein as a “truncated version” of a flagellin.

[0162] “At least a portion of a hinge region,” as used herein, refers to any part of the hinge region of the flagellin, or the entirety of the hinge region. “At least a portion of a hinge region” is also referred to herein as a “fragment of a hinge region.” At least a portion of the hinge region of fljB/STF2 can be, for example, amino acids 200-300 of SEQ ID NO: 312. Thus, if amino acids 200-300 were absent from SEQ ID NO: 312, the resulting amino acid sequence of STF2 would lack at least a portion of a hinge region.

[0163] Alternatively, at least a portion of a naturally occurring flagellin can be replaced with at least a portion of an artificial hinge region. “Naturally occurring,” in reference to a flagellin amino acid sequence, means the amino acid sequence present in the native flagellin (e.g., S. typhimurium flagellin, S. muenchin flagellin, E. coli flagellin). The naturally occurring hinge region is the hinge region that is present in the native flagellin. For example, amino acids 176-415 of SEQ ID NO: 312, amino acids 174-422 of SEQ ID NO: 501 and amino acids 173-464 of SEQ ID NO: 503, are the amino acids corresponding to the natural hinge region of STF2, E. coli fliC and S. muenchen flagellins, fliC, respectively. “Artificial,” as used herein in reference to a hinge region of a flagellin, means a hinge region that is inserted in the native flagellin in any region of the flagellin that contains or contained the native hinge region.

[0164] The hinge region of a flagellin be deleted and replaced with an antigen (e.g., HA1-1, HA1-2, the maturational cleavage site) and the resulting construct fused to another antigen (e.g., 4×M2e).

[0165] An artificial hinge region may be employed in a flagellin that lacks at least a portion of a hinge region, which may facilitate interaction of the carboxy- and amino-terminus of the flagellin for binding to TLR5 and, thus, activation of the TLR5 innate signal transduction pathway. A flagellin lacking at least a portion of a hinge region is designated by the name of the flagellin followed by a “Δ.” For example, an STF2 (e.g., SEQ ID NO: 312) that lacks at least a portion of a hinge region is referenced to as “STF2Δ” or “fljB/STF2Δ” (e.g., SEQ ID NO: 499).

[0166] The flagellin for use in the methods and compositions of the invention can be a at least a portion of a flagellin, wherein the flagellin component includes at least one cysteine residue and whereby the flagellin component activates a Toll-like Receptor 5; a flagellin component that is at least a portion of a flagellin, wherein at least one lysine of the flagellin component has been substituted with at least one arginine, whereby the flagellin component activates a Toll-like Receptor 5; a flagellin component that is at least a portion of a flagellin, wherein at least one lysine of the flagellin component has been substituted with at least one serine residue, whereby the flagellin component activates a Toll-like Receptor 5; a flagellin component that is at least a portion of a flagellin, wherein at least one lysine of the flagellin component has been substituted with at least one histidine residue, whereby the flagellin component activates a Toll-like Receptor 5, as described herein.

[0167] A recombinant fusion protein can be generated by operably linking a TLR agonist to the protein portion (e.g., HA1-1, HA1-2).

[0168] “Fusion protein,” as used herein, refers to a protein generated from at least two similar or distinct components (e.g., a protein portion of HA and a TLR agonist). Fusion proteins can be generated recombinantly or by chemical conjugation.

[0169] In an embodiment, fusion proteins of protein portions of HA and TLR agonists (e.g., SEQ ID NOS: 89-92, 95, 151-160, 177, 209, 210 and 211) can be admixed or coadministered with fusion proteins of TLR agonists and M2e proteins (e.g., SEQ ID NOS: 527, 586 and 590) and administered to a subject to stimulate an immune response, such as a protective immune response.

[0170] Fusion proteins of the invention can be designated by components of the fusion proteins separated by a “.”. For example, “STF2.HA1-2” refers to a fusion protein comprising one STF2 protein and one HA1-2 protein; and “STF2Δ.HA1-2” refers to a fusion protein comprising one STF2 protein without the hinge region and HA1-2. Exemplary fusion proteins of the invention include SEQ ID NOS: 89-92, 95, 151-160, 177, 209, 210 and 211.

[0171] The fusion proteins can include, for example, two, three, four, five, six or more Toll-like Receptor agonists (e.g., flagellin) and two, three, four, five, six or more antigens (e.g., protein portions, such as HA1-1, HA1-2). When two or more TLR agonists and/or two or more protein portions comprise fusion proteins of the invention, they are also referred to as “multimers.” For example, a multimer of HA1-1 can be four HA1-1 sequences, which is referred to herein as 4×HA1-1. Likewise, “2×HA1-1” is a multimer of two HA1-1 sequences. (See, for example, SEQ ID NOS: 342-346 and 348).

[0172] The fusion proteins of the invention can further include a linker between at least one component of the fusion protein (e.g., TLR agonist) and at least one other component of the fusion protein (e.g., HA1-1, HA1-2) of the composition, a linker between at least two of similar components of the fusion protein (e.g., HA1-1, HA1-2) or any combination thereof “Linker,” as used herein in reference to a fusion protein of the invention, refers to a connector between components of the fusion protein in a manner that the components of the fusion protein are not directly joined. For example, one part of the fusion protein (e.g., flagellin) can be linked to a distinct part (e.g., protein portion, HA1-1, HA1-2, an antigen) of the fusion protein. Likewise, at least two or more similar or like components of the fusion protein can be linked (e.g., two flagellin can further include a linker between each flagellin, or two HA proteins can further include a linker between each HA protein).

[0173] Additionally, or alternatively, the fusion proteins of the invention can include a combination of a linker between distinct components of the fusion protein and similar or like components of the fusion protein. For example, a fusion protein can comprise at least two TLR agonists that further includes a linker between, for example, two or more flagellin; at least two protein portions of HA that further include a linker between them; a linker between one component of the fusion protein (e.g., flagellin) and another distinct component of the fusion protein (e.g., protein portions of HA), or any combination thereof.

[0174] The linker can be an amino acid linker. The amino acid linker can include synthetic or naturally occurring amino acid residues. The amino acid linker employed in the fusion proteins of the invention can include at least one member selected from the group consisting of a lysine residue, a glutamic acid residue, a serine residue and an arginine residue. The amino acid linker can include, for example, SEQ ID NOS: 520, 522, 523 and 525, encoded by the nucleic acid sequences of SEQ ID NOS: 519, 521, 524 and 526 respectively.

[0175] The Toll-like Receptor agonist of the fusion proteins of the invention can be fused to a carboxy-terminus, the amino-terminus or both the carboxy- and amino-terminus of the protein portion of HA (e.g., HA1-1, HA1-2 or other antigens, such as the ectodomain of the Matrix 2 protein, a maturational cleavage site).

[0176] Fusion proteins can be generated by fusing the protein portions of HA (or other antigens, such as the maturational cleavage site of HA) to at least one of four regions (Regions 1, 2, 3 and 4) of flagellin, which have been identified based on the crystal structure of flagellin (PDB:1UCU) (see FIG. 77).

[0177] Region 1 is TIAL (SEQ ID NO: 820) . . .-. . . GLG (95-111 of SEQ ID NO: 838). The corresponding residues for Salmonella typhimurium fljB construct are TTLD (SEQ ID NO: 821) . . .-. . . GTN (196-216 of SEQ ID NO: 838). This region is an extended peptide sitting in a groove of two beta strands (GTDQKID (SEQ ID NO: 822) and NGEVTL (SEQ ID NO: 823) of (SEQ ID NO: 838). Substitution of this peptide with an antigen (e.g., HA maturational cleavage site) may mimic the conformation of wild type maturational cleavage site peptide in HA0. Exemplary amino acids that may be substituted include: flagellin residues SGLDDAAIKAAT (SEQ ID NO: 824) (201-212 of SEQ ID NO: 838) substituted with maturational cleavage site residues: RGIFGAIAGFIE (SEQ ID NO: 825), which correspond to the A/H3N2 subtype, or RGLFGAIAGFIE (SEQ ID NO: 801), which correspond to the maturational cleavage site residues from the A/H2N1, A/H1N1, A/H5N1 subtypes or with RGFFGAIAGFLE (SEQ ID NO: 803), which correspond to Influenza B HA maturational cleavage site residues.

[0178] Region 2 of the Salmonella flagellin is a small loop GTG (238-240 of SEQ ID NO: 838) in 1UCU structure (see FIG. 77). The corresponding loop in Salmonella fljB is GADAA (SEQ ID NO: 826) (244-248 of SEQ ID NO: 838). Insertion of an antigen (e.g., protein portions of HA, a maturation cleavage site peptide) in this loop or replacement of the entire loop with an antigen (e.g., protein portions of HA, a maturational cleavage site peptide) should preserve the extended loop structure of the maturational cleavage site peptide that is associated with the native HA molecule.

[0179] Region 3 is a bigger loop that resides on the opposite side of the Region 1 peptide (see FIG. 77). This loop can be simultaneously substituted together with region 1 to create a double copy of the antigen (e.g., protein portions of HA, a maturational cleavage site peptide). The loop starts from AGGA (SEQ ID NO: 827) and ends at PATA (SEQ ID NO: 828) (259-274 of SEQ ID NO: 838). The corresponding Salmonella fljB sequence is AAGA (SEQ ID NO: 829 . . .-. . . ATTK (SEQ ID NO: 830) (266-281 of SEQ ID NO: 838). The sequence AGATKTTMPAGA (SEQ ID NO: 831) (267-278 of SEQ ID NO: 838) can be replaced with the antigens (e.g., protein portions of HA, a maturation cleavage site peptides).

[0180] Region 4 is the loop (VTGTG (SEQ ID NO: 832)) connecting a short α-helix (TEAKAALTAA (SEQ ID NO: 833)) and a β-strand (ASVVKMSYTDN (SEQ ID NO: 834) in 1UCU structure (see FIG. 77). The corresponding loop in Salmonella fljB is a longer loop VDATDANGA (SEQ ID NO: 835(307-315 of SEQ ID NO: 838). An antigen (e.g., a protein portion of HA, a maturation cleavage site peptide) can be inserted into or replace this region.

[0181] One or more copies of antigens (e.g., maturation cleavage site) can be inserted or used to replace the peptides listed in the above four regions. Preferably, the replacements would be in Region 1 and Region 3.

[0182] Exemplary sequences of maturation cleavage site peptides of HA are listed below:

| Sequence | Subtype |
|---|---|
| NVPEKQTRGIFGAIAGFIE | A/H3N2 (SEQ ID NO: 798) |
| NVPQIESRGLFGAIAGFIE | A/H2N1 (SEQ ID NO: 799) |
| NIPSIQSRGLFGAIAGFIE | A/H1N1 (SEQ ID NO: 800) |
| RERRRKKRGLFGAIAGFIE | A/H5N1 (SEQ ID NO: 836) |
| PAKLLKERGFFGAIAGFLE | B/HA (SEQ ID NO: 802) |

Sequence alignment of X-ray model (1UCU) and SEQ ID NO: 838
75.1% identity in 506 residues overlap; Score: 1703.0; Gap frequency: 2.6%

| | | | |
|---|---|---|---|
| 1UCU | 1 | AQVINTNSLSLLTQNNLNKSQSALGTAIERLSSGLRINSAKDDAAGQAIANRFTANIKGL | (SEQ ID NO: 837) |
| Sfla | 2 | AQVINTNSLSLLTQNNLNKSQSALGTAIERLSSGLRINSAKDDAAGQAIANRFTANIKGL | (SEQ ID NO: 838) |
| | | ************************************************************ | |
| 1UCU | 61 | TQASRNANDGISIAQTTEGALNEINNNLQRVRELAVQSANSTNSQSDLDSIQAEITQRLN | |
| Sfla | 62 | TQASRNANDGISIAQTTEGALNEINNNLQRVRELAVQSANSTNSQSDLDSIQAEITQRLN | |
| | | ************************************************************ | |
| 1UCU | 121 | EIDRVSGQTQFNGVKVLAQDNTLTIQVGANDGETIDIDLKQINSQTLGLDTLNVQQKYKV | |
| Sfla | 122 | EIDRVSGQTQFNGVKVLAQDNTLTIQVGANDGETIDIDLKQINSQTLGLDSLNVQKAYDV | |
| | | ************************************************** **** * * | |
| 1UCU | 181 | SDTAATVTGYAD--TTI---ALDNSTFKASATGLGGTDQKIDGDLKFDDTTGKYYAKVTV | |
| Sfla | 182 | KDTAVTTKAYANNGTTLDVSGLDDAAIKAATGGTNGTASVTGGAVKFDADNNKYFVTIGG | |
| | | *** * ** ** ** ** * ** * *** ** | |
| 1UCU | 236 | TGGT-GKDGYYEVSVDKTNGEVTLAGGATSPLTGGLPATATEDVKNVQVANADLTEAKA | |
| Sfla | 242 | FTGADAAKNGDYEVNV-ATDGTVTLAAGATKTTMPAGATTKTEVQELKDTPAVVSADAKN | |
| | | * * * *** * * * **** *** * ** ** | |
| 1UCU | 294 | ALTAAGVTGT----ASVVKMSYTDNNGKTIDGGLAVKVGDDYYSATQNK-DGSISINTTK | |
| Sfla | 301 | ALIAGGVDATDANGAELVKMSYTDKNGKTIEGGYALKAGDKYYAADYDEATGAIKAKTTS | |
| | | ** * ** * * ******* ***** ** * * ** ** * * * ** | |
| 1UCU | 349 | YTADDGTSKTALNKLGGADGKTEVVSIGGKTYAASKAEGHNFKAQPDLAEAAATTTENPL | |
| Sfla | 361 | YTAADGTTKTAANQLGGVDGKTEVVTIDGKTYNASKAAGHDFKAQPELAEAAAKTTENPL | |
| | | *** *** *** * *** ******* * **** **** ** ***** ****** ****** | |
| 1UCU | 409 | QKIDAALAQVDTLRSDLGAVQNRFNSAITNLGNTVNNLTSVRSRIEDSDYATEVSNMSRA | |
| Sfla | 421 | QKIDAALAQVDALRSDLGAVQNRFNSAITNLGNTVNNLSEARSRIEDSDYATEVSNMSRA | |
| | | *********** ************************** ******************* | |
| 1UCU | 469 | QILQQAGTSVLAQANQVPQNVLSLLR | |
| Sfla | 481 | QILQQAGTSVLAQANQVPQNVLSLLR | |
| | | ************************** | |

[0183] The methods of making a protein that stimulates a protective immune response in a subject can further include the step of operably linking a nucleic acid sequence encoding a carrier protein to the nucleic acid sequence encoding a portion of the viral hemagglutinin.

[0184] “Carrier,” as used herein, refers to a molecule (e.g., protein, peptide) that can enhance stimulation of a protective immune response. Carriers can be physically attached (e.g., linked by recombinant technology, peptide synthesis, chemical conjugation or chemical reaction) to a composition (e.g., a protein portion of a naturally occurring viral hemagglutinin) or admixed with the composition.

[0185] Carriers for use in the methods and compositions described herein can include, for example, at least one member selected from the group consisting of Tetanus toxoid (TT), Vibrio cholerae toxoid, Diphtheria toxoid (DT), a cross-reactive mutant (CRM) of diphtheria toxoid, E. coli enterotoxin, E. coli B subunit of heat labile enterotoxin (LTB), Tobacco mosaic virus (TMV) coat protein, protein Rabies virus (RV) envelope protein (glycoprotein), thyroglobulin (Thy), heat shock protein HSP 60 Kda, Keyhole limpet hemocyamin (KLH), an early secreted antigen tuberculosis-6 (ESAT-6), exotoxin A, choleragenoid, hepatitis B core antigen, and the outer membrane protein complex of N. meningiditis (OMPC) (see, for example, Schneerson, R., et al., Prog Clin Biol Res 47:77-94 (1980); Schneerson, R., et al., J Exp Med 152:361-76 (1980); Chu, C., et al., Infect Immun 40: 245-56 (1983); Anderson, P., Infect Immun 39:233-238 (1983); Anderson, P., et al., J Clin Invest 76:52-59 (1985); Fenwick, B. W., et al., 54:583-586 (1986); Que, J. U., et al. Infect Immun 56:2645-9 (1988); Que, J. U., et al. Infect Immun 56:2645-9 (1988); (Que, J. U., et al. Infect Immun 56:2645-9 (1988); Murray, K., et al., Biol Chem 380:277-283 (1999); Fingerut, E., et al., Vet Immunol Immunopathol 112:253-263 (2006); and Granoff, D. M., et al., Vaccine 11:Suppl 1:S46-51 (1993)).

[0186] Exemplary carrier proteins for use in the methods and compositions described herein can include at least one member selected from the group consisting of SEQ ID NOS: 786-793.

[0187] The compositions of the invention can further include at least one adjuvant. Adjuvants contain agents that can enhance the immune response against substances that are poorly immunogenic on their own (see, for example, Immunology Methods Manual, vol. 2, I. Lefkovits, ed., Academic Press, San Diego, Calif., 1997, ch. 13). Immunology Methods Manual is available as a four volume set, (Product Code Z37, 435-0); on CD-ROM, (Product Code Z37, 436-9); or both, (Product Code Z37, 437-7). Adjuvants can be, for example, mixtures of natural or synthetic compounds that, when administered with compositions of the invention, such as proteins that stimulate a protective immune response made by the methods described herein, further enhance the immune response to the protein. Compositions that further include adjuvants may further increase the protective immune response stimulated by compositions of the invention by, for example, stimulating a cellular and/or a humoral response (i.e., protection from disease versus antibody production). Adjuvants can act by enhancing protein uptake and localization, extend or prolong protein release, macrophage activation, and T and B cell stimulation. Adjuvants for use in the methods and compositions described herein can be mineral salts, oil emulsions, mycobacterial products, saponins, synthetic products and cytokines Adjuvants can be physically attached (e.g., linked by recombinant technology, by peptide synthesis or chemical reaction) to a composition described herein or admixed with the compositions described herein.

[0188] In another embodiment, the invention is a method of making a protein that stimulates a protective immune response in a subject, comprising the steps of separating a portion of a protein from a naturally occurring viral hemagglutinin to thereby form a protein portion, wherein the protein portion includes at least a portion of a globular head and at least a portion of at least one secondary structure that causes the globular head to essentially retain its tertiary structure, and wherein the protein portion lacks a membrane fusion domain, a transmembrane domain and a cytoplasmic domain; transfecting a nucleic acid sequence encoding the protein portion into a eukaryotic host cell, wherein the eukaryotic host cell is not a Pichia pastoris eukaryotic host cell; and culturing the eukaryotic host cell to thereby make the protein. In one embodiment, the protein portion can further lack a signal sequence. In another embodiment, the protein portion can further include a sialic acid binding site.

[0189] In a further embodiment, the invention is a method of making a protein that stimulates a protective immune response in a subject, comprising the steps of separating a portion of a protein from a naturally occurring viral hemagglutinin to thereby form a protein portion, wherein the protein portion includes at least a portion of a globular head, and at least a portion of at least one secondary structure that causes the globular head to essentially retain its tertiary structure, and wherein the protein portion lacks a membrane fusion domain, a transmembrane domain and a cytoplasmic domain; transfecting a nucleic acid sequence encoding the protein portion into a eukaryotic host cell, wherein the eukaryotic host cell is not an insect eukaryotic host cell; and culturing the eukaryotic host cell to thereby make the protein that stimulates a protective immune response in a subject.

[0190] In a further embodiment, the invention is a method of making a protein that stimulates a protective immune response in a subject, comprising the steps of separating a portion of a protein from a naturally occurring viral hemagglutinin to thereby form a protein portion, wherein the protein portion includes at least a portion of a globular head, and at least a portion of at least one secondary structure that causes the globular head to essentially retain its tertiary structure, and wherein the protein portion lacks a membrane fusion domain, a transmembrane domain and a cytoplasmic domain; transfecting a nucleic acid sequence encoding the protein portion into a eukaryotic host cell, wherein the eukaryotic host cell is not a stably transformed insect cell; and culturing the eukaryotic host cell to thereby make the protein that stimulates a protective immune response in a subject.

[0191] In another embodiment, the invention is a method of making a protein that stimulates a protective immune response in a subject, comprising the steps of separating a portion of a protein from a naturally occurring viral hemagglutinin to thereby make a protein portion, wherein the protein portion includes at least a portion of a globular head and at least a portion of at least one secondary structure that causes the globular head to essentially retain its tertiary structure, and wherein the protein portion lacks a membrane fusion domain, a transmembrane domain and a cytoplasmic domain; infecting a nucleic acid sequence encoding the protein portion into an insect cell host cell (e.g., a baculovirus insect host cell, such as Sf9 or High5 cells); and culturing the insect host cell to thereby make the protein that stimulates a protective immune response in a subject.

[0192] The methods of making a protein that stimulates a protective immune response in a subject can further include the step of deleting at least one glycosylation site in the nucleic acid sequence encoding the protein portion. The glycosylation site that is deleted can include an N-glycosylation site.

[0193] The eukaryotic host cells employed in the methods of the invention can include a Saccharomyces eukaryotic host cell, an insect eukaryotic host cell (e.g., at least one member selected from the group consisting of a Baculovirus infected insect cell, such as Spodoptera frugiperda (Sf9) or Trichhoplusia ni (High5) cells; and a Drosophila insect cell, such as Dme12 cells), a fungal eukaryotic host cell, a parasite eukaryotic host cell (e.g., a Leishmania tarentolae eukaryotic host cell), CHO cells, yeast cells (e.g., Pichia) and a Kluyveromyces lactis host cell.

[0194] Suitable eukaryotic host cells and vectors can also include plant cells (e.g., tomato; chloroplast; mono- and dicotyledonous plant cells; Arabidopsis thaliana; Hordeum vulgare; Zea mays; potato, such as Solanum tuberosum; carrot, such as Daucus carona L.; and tobacco, such as Nicotiana tabacum, Nicotiana benthamiana (Gils, M., et al., Plant Biotechnol J. 3:613-20 (2005); He, D. M., et al., Colloids Surf B Biointerfaces, (2006); Huang, Z., et al., Vaccine 19:2163-71 (2001); Khandelwal, A., et al., Virology. 308:207-15 (2003); Marquet-Blouin, E., et al., Plant Mol Biol 51:459-69 (2003); Sudarshana, M. R., et al. Plant Biotechnol J. 4:551-9 (2006); Varsani, A., et al., Virus Res, 120:91-6 (2006); Kamarajugadda S., et al., Expert Rev Vaccines 5:839-49 (2006); Koya V, et al., Infect Immun. 73:8266-74 (2005); Zhang, X., et al., Plant Biotechnol J. 4:419-32 (2006)).

[0195] The proteins made by the methods of the invention and the compositions of the invention can be purified and characterized employing well-known methods (e.g., gel chromatography, cation exchange chromatography, SDS-PAGE), as described herein.

[0196] For large scale production, fermentation techniques can be employed, as described herein. Additional exemplary fermentation techniques can include a proposed cycle that can start with a culture inoculated into 6 L of MRBR media, as described herein, held at about 30° C., about pH 7, and DO controlled to greater than about 30%. A 6 liter feed can then be started at least about 30 minutes after glucose exhaustion. The proposed 6 liter feed media, when combined with 6 L of MRBR media, can provide the necessary conditions for E. coli growth based on about 52% utilization of carbon for growth. The feed may or may not include IPTG. The batch can be induced with at least 2 mM IPTG, introduced as a bolus, shortly after the feed is started to initiate production. The feed rate can start at about 20 mL feed per hour per liter bioreactor volume and increase over time based on the ability of the culture to accept more glucose without glucose accumulation. The culture can be harvested when the feed is complete. The 6 liter feed media, about pH 6.0, can include Glucose 180 g/L; KH₂PO₄ 2 g/L; NaH₂PO₄ (H₂O) 4 g/L; (NH₄)₂HPO₄ 12 g/L; (NH₄)₂HSO₄ 4 g/L; DL-Alanine 40 g/L; Citric Acid 4 g/L; MgSO₄(7H₂0) 5.5 g/L; Trace Metals 6 mL; CaCl₂ 2.5 g/L; FeSO₄ 7H₂O 1 g/L.

[0197] Cell disruption and clarification in a large scale production can include removal of Triton X-100 from the resuspension buffer; dissolution of insolubles by the addition of 50 mM Tris, 25 mM NaCl, 8 M urea, about pH 8 to the lysate; addition of PEI (poly ethylamine) and subsequent removal by centrifugation with one or more of the buffers to remove nucleic acids and/or aid in filtration; the addition of flocullants, such as Aerosil 380, Aerosil 200, Alkoxide Alu C, and Celpur; and subsequent removal by centrifugation to aid in filtration. Cation exchange chromatography can include the use of a process resin, adding a denaturing endotoxin removal step containing up to 8 M urea and up to about 2% Triton X-100, and a step gradient elution. The step elution gradient can include about 100 to about 200 mM NaCl.

[0198] In yet another embodiment, the invention is a method of stimulating protective immunity in a subject, comprising the step of administering to the subject a composition that includes a protein made by a method comprising the steps of separating a portion of a protein from a naturally occurring viral hemagglutinin to thereby form a protein portion, wherein the protein portion includes at least a portion of a globular head and at least a portion of at least one secondary structure that causes the globular head to essentially retain its tertiary structure, and wherein the protein portion lacks a membrane fusion domain, a transmembrane domain and a cytoplasmic domain; transforming a nucleic acid sequence encoding the portion into a prokaryotic host cell; and culturing the prokaryotic host cell to thereby make the protein that stimulates protective immunity in a subject.

[0199] In still another embodiment, the invention is a method of stimulating protective immunity in a subject, comprising the step of administering to the subject a composition that includes a protein portion of a naturally occurring viral hemagglutinin, wherein the protein portion includes at least a portion of a globular head and at least a portion of one secondary structure that causes the globular head to essentially retain its tertiary structure and wherein the protein portion lacks a membrane fusion domain, a transmembrane domain and a cytoplasmic domain.

[0200] In a further embodiment, the invention is a method of making a viral hemagglutinin protein that stimulates a protective immune response in a subject, comprising the steps of separating a portion of a protein from a naturally occurring viral hemagglutinin to thereby make a protein portion, wherein the protein portion includes at least a portion of a globular head and at least a portion of at least one secondary structure that causes the globular head to essentially retain its tertiary structure, and wherein the protein portion lacks a membrane fusion domain, a transmembrane domain and a cytoplasmic domain; transfecting a nucleic acid sequence encoding the portion in a eukaryotic host cell, wherein the eukaryotic host cell is not a Pichia pastoris eukaryotic host cell; and culturing the eukaryotic host cell to thereby make the protein that stimulates a protective immune response in a subject.

[0201] In yet another embodiment, the invention is a method of making a viral hemagglutinin protein that stimulates a protective immune response in a subject, comprising the steps of separating a portion of a protein from a naturally occurring viral hemagglutinin to thereby make a protein portion, wherein the protein portion includes at least a portion of a globular head and at least a portion of at least one secondary structure that causes the globular head to essentially retain its tertiary structure, and wherein the protein portion lacks a membrane fusion domain, a transmembrane domain and a cytoplasmic domain; transfecting a nucleic acid sequence encoding the portion in a eukaryotic host cell, wherein the eukaryotic host cell is not a Drosophila melanogaster eukaryotic host cell; and culturing the eukaryotic host cell to thereby make the protein that stimulates a protective immune response in a subject.

[0202] In still another embodiment, the invention is a method of making a viral hemagglutinin protein that stimulates a protective immune response in a subject, comprising the steps of transforming a prokaryotic host cell with a nucleic acid sequence encoding at least one viral hemagglutinin that lacks a transmembrane domain and a cytoplasmic domain; and culturing the prokaryotic cell to thereby make the protein that stimulates a protective immune response in a subject.

[0203] An additional embodiment of the invention is a method of stimulating protective immunity in a subject, comprising the step of administering to the subject a composition that includes a protein made by a method comprising the steps of transforming a prokaryotic host cell with a nucleic acid sequence encoding at least one viral hemagglutinin that lacks a transmembrane domain and a cytoplasmic domain; and culturing the prokaryotic host cell to thereby make the protein that stimulates a protective immune response in a subject.

[0204] In another embodiment, the invention is a method of stimulating protective immunity in a subject, comprising the step of administering to the subject a composition that includes a protein having at least one viral hemagglutinin that lacks a transmembrane domain and a cytoplasmic domain, wherein the protein was expressed in a prokaryotic cell.

[0205] In still another embodiment, the invention is a composition comprising at least a portion of at least one pathogen-associated molecular pattern and a protein portion of a naturally occurring viral hemagglutinin, wherein the protein portion of the naturally occurring viral hemagglutinin includes at least a portion of a globular head and at least a portion of at least one secondary structure that causes the globular head to essentially retain its tertiary structure, and wherein the protein portion of the naturally occurring viral hemagglutinin lacks a membrane fusion domain, a transmembrane domain, and a cytoplasmic domain.

[0206] Pathogen-associated molecular patterns (PAMPs), such as a flagellin or a bacterial lipoprotein, refer to a class of molecules (e.g., protein, peptide, carbohydrate, lipid, lipopeptide, nucleic acid) found in microorganisms that, when bound to a pattern recognition receptor (PRR), can trigger an innate immune response. The PRR can be a Toll-like Receptor (TLR).

[0207] TLRs are the best characterized type of Pattern Recognition Receptor (PRR) expressed on antigen-presenting cells (APC). APC utilize TLRs to survey the microenvironment and detect signals of pathogenic infection by engaging the cognate ligands of TLRs, PAMPs. PAMP and TLR interaction triggers the innate immune response, the first line of defense against pathogenic insult, manifested as release of cytokines, chemokines and other inflammatory mediators; recruitment of phagocytic cells; and important cellular mechanisms which lead to the expression of costimulatory molecules and efficient processing and presentation of antigens to T-cells. TLRs control both innate and the adaptive immune responses.

[0208] The binding of PAMPs to TLRs activates innate immune pathways. Target cells can result in the display of co-stimulatory molecules on the cell surface, as well as antigenic peptide in the context of major histocompatibility complex molecules (see FIG. 40). The compositions, fusion proteins or polypeptides of the invention can include a PAMP (e.g., a flagellin) that binds to a TLR (e.g., TLR5), promoting differentiation and maturation of the APC, including production and display of co-stimulatory signals (see FIG. 40). The compositions can be internalized by its interaction with the TLR and processed through the lysosomal pathway to generate antigenic peptides, which are displayed on the surface in the context of the major histocompatibility complex.

[0209] The compositions, fusion proteins and polypeptides of the invention employ pathogen-associated molecular patterns (TLR agonists) that trigger cellular events resulting in the expression of costimulatory molecules, secretion of critical cytokines and chemokines; and efficient processing and presentation of antigens to T-cells. As discussed above, TLRs recognize PAMPs including bacterial cell wall components (e.g., bacterial lipoproteins and lipopolysaccharides), bacterial DNA sequences that contain unmethylated CpG residues and bacterial flagellin. TLRs act as initiators of the innate immune response and gatekeepers of the adaptive immune response (Medzhitov, R., et al., Cold Springs Harb. Symp. Quant. Biol. 64:429 (1999); Pasare, C., et al., Semin, Immunol 16:23 (2004); Medzhitov, R., et al., Nature 388:394 (1997); Barton, G. M., et al., Curr. Opin. Immunol 14:380 (2002); Bendelac, A., et al., J. Exp. Med. 195:F19 (2002)).

[0210] As discussed above, the binding of PAMPs to TLRs activates immune pathways for use in the compositions, fusion proteins and polypeptides of the invention, which can be employed in stimulating the immune system in a subject. The compositions, fusion proteins and polypeptides of the invention can trigger an immune response to an antigen (e.g., a viral protein, such as an influenza viral) and trigger signal transduction pathways of the innate and adaptive immune system of the subject to thereby stimulate the immune system of a subject. Stimulation of the immune system of the subject may prevent infection by an antigen or a virus (e.g., an influenza virus) and thereby treat the subject or prevent the subject from disease, illness and, possibly, death.

[0211] In an additional embodiment, the invention is a composition comprising a flagellin component that is at least a portion of a flagellin, wherein the flagellin component includes at least one cysteine residue and whereby the flagellin component activates a Toll-like Receptor 5.

[0212] “Flagellin component,” as used herein, means at least part of or the entirety of a flagellin.

[0213] “Activates,” when referring to a Toll-like Receptor (TLR), means that the component (e.g., a flagellin component or a Toll-like Receptor agonist component) stimulates a response associated with a TLR. For example, bacterial flagellin activates TLR5 and host inflammatory responses (Smith, K. D., et al., Nature Immunology 4:1247-1253 (2003)). Bacterial lipopeptide activates TLR1; Pam3Cys, Pam2Cys activate TLR2; dsRNA activates TLR3; LBS (LPS-binding protein) and LPS (lipopolysaccharide) activate TLR4; imidazoquinolines (anti-viral compounds and ssRNA) activate TLR7; and bacterial DNA (CpG DNA) activates TLR9. TLR1 and TLR6 require heterodimerization with TLR2 to recognize ligands (e.g., TLR agonists, TLR antagonists). TLR1/2 are activated by triacyl lipoprotein (or a lipopeptide, such as Pam3Cys), whereas TLR6/2 are activated by diacyl lipoproteins (e.g., Pam2Cys), although there may be some cross-recognition. In addition to the natural ligands, synthetic small molecules including the imidazoquinolines, with subclasses that are specific for TLR7 or TLR8 can activate both TLR7 and TLR8. There are also synthetic analogs of LPS that activate TLR4, such as monophosphoryl lipid A [MPL].

[0214] TLR activation can result in signaling through MyD88 and NF-κB. There is some evidence that different TLRs induce different immune outcomes. For example, Hirschfeld, et al. Infect Immun 69:1477-1482 (2001)) and Re, et al. J Biol Chem 276:37692-37699 (2001) demonstrated that TLR2 and TLR4 activate different gene expression patterns in dendritic cells. Pulendran, et at J Immunol 167:5067-5076 (2001)) demonstrated that these divergent gene expression patterns were recapitulated at the protein level in an antigen-specific response, when lipopolysaccharides that signal through TLR2 or TLR4 were used to guide the response (TLR4 favored a Th1-like response with abundant IFNγ secretion, while TLR2 favored a Th2-line response with abundant IL-5, IL-10, and IL-13 with lower IFNγ levels). There is redundancy in the outcome of signaling through different TLRs.

[0215] Activation of TLRs can result in increased effector cell activity that can be detected, for example, by measuring IFNγ-secreting CD8+ cells (e.g., cytotoxic T-cell activity); increased antibody responses that can be detected by, for example, ELISA, virus neutralization, and flow cytometry (Schnare, M., et al., Nat Immunol 2:947 (2001); Alexopoulou, L., et al., Nat Med 8:878 (2002); Pasare, C., et al., Science 299:1033 (2003); Napolitani, G., et al., Nat Immunol 6:769 (2005); and Applequist, S. E., et al., J Immunol 175:3882 (2005)).

[0216] The composition comprising a flagellin component that is at least a portion of a flagellin, wherein the flagellin component includes at least one cysteine residue and whereby the flagellin component activates a Toll-like Receptor 5 can further include at least a portion of at least one member selected from the group consisting of a Toll-like Receptor 1 agonist, a Toll-like Receptor 2 agonist (e.g., Pam3Cys, Pam2Cys), a Toll-like Receptor 3 agonist, a Toll-like Receptor 4 agonist, a Toll-like Receptor 6 agonist, a Toll-like Receptor 7 agonist, a Toll-like Receptor 8 agonist a Toll-like Receptor 9 agonist, a Toll-like Receptor 10 agonist, a Toll-like Receptor 11 agonist and a Toll-like Receptor 12 agonist.

[0217] The a Toll-like Receptor 1 agonist, a Toll-like Receptor 2 agonist, a Toll-like Receptor 3 agonist, a Toll-like Receptor 4 agonist, a Toll-like Receptor 6 agonist, a Toll-like Receptor 7 agonist, a Toll-like Receptor 8 agonist a Toll-like Receptor 9 agonist a Toll-like Receptor 10 agonist, a Toll-like Receptor 11 agonist and a Toll-like Receptor 12 agonist employed in the compositions, such as compositions comprising a flagellin component that is at least a portion of a flagellin, wherein the flagellin component includes at least one cysteine residue and whereby the flagellin component activates TLR5, can further include at least one additional cysteine residue.

[0218] In one embodiment, at least one cysteine residue substitutes for at least one amino acid residue in a naturally occurring flagellin amino acid sequence of the flagellin component.

[0219] The cysteine residue that substitutes for at least one amino acid residue in a naturally occurring flagellin amino acid sequence of the flagellin component can be remote to at least one amino acid of the Toll-like Receptor 5 recognition site of the flagellin component. “Toll-like Receptor 5 recognition site,” means that part of the TLR5 ligand (e.g., TLR5 agonist) that interacts with TLR5 to mediate a cellular response. “Toll-like Receptor 5 recognition site” is also referred to as a “Toll-like Receptor 5 activation site” and a “Toll-like Receptor 5 activation domain.”

[0220] Likewise, “Toll-like Receptor recognition site,” means that part of the Toll-like Receptor ligand (e.g., a Toll-like Receptor agonist) that interacts with its respective TLR to mediate a cellular response. “Toll-like Receptor recognition site” is also referred to as a “Toll-like Receptor activation site” and a “Toll-like Receptor activation domain.”

[0221] The cysteine residue that substitutes for at least one amino acid residue in a naturally occurring flagellin amino acid sequence of the flagellin component can also be remote to at least one amino acid of the flagellin component involved in binding to the toll like receptor 5.

[0222] In another embodiment, the flagellin component includes at least a portion of a naturally occurring flagellin amino acid sequence in combination with the cysteine residue.

[0223] The cysteine residue used in combination (also referred to herein as “added cysteine”) with at least a portion of a naturally occurring flagellin amino acid sequence can be at least one member selected from the group consisting of the amino-terminal amino acid of the flagellin component or the Toll-like Receptor agonist component and the carboxy-terminal amino acid of the flagellin component or the Toll-like Receptor agonist component. The cysteine residue used in combination with at least a portion of a naturally occurring flagellin amino acid sequence can be remote to at least one amino acid of the Toll-like Receptor 5 recognition site of the flagellin component or remote to at least one amino acid of the Toll-like Receptor recognition site of the Toll-like Receptor agonist component.

[0224] The cysteine residue used in combination with at least a portion of a naturally occurring flagellin amino acid sequence can be remote to at least one amino acid of the flagellin component involved in binding to the Toll-like Receptor 5 or remote to at least one amino acid of a Toll-like Receptor agonist component involved in binding to the Toll-like Receptor.

[0225] In another embodiment, the flagellin component lacks at least a portion of a hinge region of a naturally occurring flagellin amino acid sequence.

[0226] The composition comprising a flagellin component that is at least a portion of a flagellin, wherein the flagellin component includes at least one cysteine residue and whereby the flagellin component activates a Toll-like Receptor 5 can further include at least a portion of at least one antigen (e.g., an influenza antigen, such as an influenza A, B or C antigen).

[0227] The antigen can be an essentially hydrophobic antigen, such as a maturational cleavage site antigen of HA. The maturational cleavage site antigen can be at least one member selected from the group consisting of (SEQ ID NOS: 529, 531, 532, 533, 534, 599, 600, 601, 602 and NVPEKQTRGIFGAIAGFIE (H3) (SEQ ID NO: 794), NIPSIQSRGLFGAIAGFIE (H1) (SEQ ID NO: 795), PAKLLKERGFFGAIAGFLE (FLU B) (SEQ ID NO: 796), RERRRKKRGLFGAIAGFIE (H5) (SEQ ID NO: 797), RGLXGAIAGFIE (SEQ ID NO: 818), RGLXGAIAGFIE (SEQ ID NO: 819).

[0228] “Essentially hydrophobic,” as used herein, means that the antigen has limited solubility in an aqueous solution or environment. The hydrophobic nature of peptides or proteins can be determined and compared, for example, by the Kyte-Doolitle hydrophobicity scale (Kyte, J., et al., Mol. Biol. 157: 105-132 (1982), (1982)), which assigns a numerical value for each of the 20 amino acids according to relative hydrophobicity. A positive value indicates a hydrophobic amino acid. A negative value indicates a hydrophilic amino acid. The average of these values for an individual peptide or polypeptide (calculated by adding the individual hydrophobicity values for each amino acid of the polypeptide or protein and dividing the total value by the number of amino acids in the polypeptide or protein) provides an index of overall hydrophobicity known as the “grand average of hydropathicity,” also referred to as “GRAVY.” A GRAVY value greater than zero indicates the protein or peptide is essentially hydrophobic. A GRAVY value less than zero indicates the protein or peptide is essentially hydrophilic. The individual hydrophobicity values, for the 20 naturally occurring amino acids according to the Kyte-Doolittle scale (Kyte, J., et al., Mol. Biol. 157: 105-132 (1982)), are as follows:

| | |
|---|---|
| Alanine | 1.8 |
| Arginine | −4.5 |
| Asparagine | −3.5 |
| Aspartic acid | −3.5 |
| Cysteine | 2.5 |
| Glutamine | −3.5 |
| Glutamic acid | −3.5 |
| Glycine | −0.4 |
| Histidine | −3.2 |
| Isoleucine | 4.5 |
| Leucine | 3.8 |
| Lysine | −3.9 |
| Methionine | 1.9 |
| Phenylalanine | 2.8 |
| Proline | −1.6 |
| Serine | −0.8 |
| Threonine | −0.7 |
| Tryptophan | −0.9 |
| Tyrosine | −1.3 |
| Valine | 4.2 |

[0229] The hydrophobicity of antigens, such as protein or peptide antigens, for use in the compositions and methods of the invention can be determined by calculating a GRAVY score based on the hydrophobicity values of the above Kyte-Doolittle scale. For example, GRAVY scores, which indicate essentially hydrophobic peptides, were calculated by addition of the hydrophobicity values (supra) of individual amino acids for the following maturational cleavage site amino peptides:

| Maturational Cleavage Site | GRAVY |
|---|---|
| NVPEKQTRGIFGAIAGFIE (A/H3N2) | 0.053 |
| (SEQ ID NO: 798) | |
| NVPQIESRGLFGAIAGFIE (A/H2N1) | 0.453 |
| (SEQ ID NO: 799) | |
| NIPSIQSRGLFGAIAGFIE (A/H1N1) | 0.611 |
| (SEQ ID NO: 800) | |
| RGLFGAIAGFIE (Influenza A conserved region) | 1.067 |
| (SEQ ID NO: 801) | |
| PAKLLKERGFFGAIAGFLE (Influenza B) | 0.400 |
| (SEQ ID NO: 802) | |
| RGFFGAIAGFLE (Influenza B conserved region) | 0.925 |
| (SEQ ID NO: 803) | |

[0230] Likewise, GRAVY scores, which indicate essentially hydrophilic peptides, were calculated for the following peptides:

| Amino Acid Sequence | GRAVY |
|---|---|
| human influenza M2e (SEQ ID NO: 804) | −1.129 |
| SLLTEVETPIRNEWGSRSNDSSDP | |
| Vietnam influenza M2e (SEQ ID NO: 805) | −0.907 |
| GSGAG SLLTEVETPTRNEWECRCSDSSDP | |
| Hong Kong influenza M2e (SEQ ID NO: 806) | −0.507 |
| GSGAGSLLTEVETLTRNGWGCRCSDSSDP | |
| West Nile Virus E peptide 001 | −0.475 |
| (SEQ ID NO: 807) | |
| LTSGHLKCRVKMEKLQLKGT | |
| Dengue 2 E peptide (SEQ ID NO: 808) | −0.333 |
| EAEPPFGDSYIIIGVEPGQLKLNWFKK | |
| BCRABL wt peptide (SEQ ID NO: 809) | −1.129 |
| SLLTEVETPIRNEWGSRSNDSSDP | |

[0231] An antigen can be any molecule (e.g., protein, peptide, glycoprotein, glycopeptide, carbohydrate, lipid, lipopeptide, polysaccharide) that can be recognized by the components of the immune system regardless of whether it can trigger activation of the immune system. The antigen can be a fragment or portion of a naturally occurring antigen or a synthetic molecule that mimics the naturally occurring antigen or a portion of the naturally occurring antigen.

[0232] The antigen can be a viral antigen. A “viral antigen,” as used herein, refers to any portion of a virus (e.g., influenza virus, flavivirus) that generates an immune response in a subject either when employed in combination with a TLR agonist (e.g., a flagellin, Pam2Cys, Pam3Cys) or in the absence of a TLR agonist. The viral antigen can be a portion or a fragment of a naturally occurring virus or a synthetic molecule that mimics a naturally occurring virus, such as a recombinant or synthetic protein (e.g., influenza virus, flavivirus), peptide, lipid, carbohydrate, that generates an immune response in the subject. The influenza antigen can include at least one member selected from the group consisting of an influenza A antigen, influenza B antigen and an influenza C antigen. The influenza antigen can be an influenza virus integral membrane protein, such as HA, or a protein portion of HA, such as HA1-1 and HA1-2.

[0233] The antigen can be at least a portion of an influenza Matrix 2 (M2) protein, including at least a portion of the ectodomain of an influenza M2 protein (M2e).

[0234] Matrix protein 2 (M2 or M2 protein) is a proton-selective integral membrane ion channel protein of the influenza A virus. M2 is abundantly expressed at the plasma membrane of virus-infected cells, but is generally underexpressed by virions. For example, a portion of an M2 sequence of influenza A is SEQ ID NO: 507, which is encoded by SEQ ID NO: 508. The native form of the M2 protein is a homotetramer (i.e., four identical disulfide-linked M2 protein molecules). Each of the units are helices stabilized by two disulfide bonds. M2 is activated by low pH. Each of the M2 protein molecules in the homotetramer consists of three domains: a 24 amino acid outer or N (amino)-terminal domain (e.g., SEQ ID NO: 509; also referred to herein as a “human consensus sequence”), which is encoded by SEQ ID NO: 510; a 19 hydrophobic amino acid transmembrane region, and a 54 amino acid inner or C (carboxy)-terminal domain. The M2 protein can vary depending upon the influenza viral subtype (e.g., H1 and H5 subtypes of influenza A) and influenza viral source (e.g., Puerto Rico, Thailand, New York, Hong Kong), as shown, for example, in exemplary amino-terminal sequences of M2 proteins (SEQ ID NOS: 543-555 and 569-577) and as described in PCT/US2005/046662 (WO2006/069262).

[0235] The M2 protein has an important role in the life cycle of the influenza A virus. It is important in the uncoating stage where it permits the entry of protons into the viral particle, which lowers the pH inside the virus, resulting in dissociation of the viral matrix protein M1 from the ribonucleoprotein RNP. As a consequence, the virus coat is removed and the contents of the virus are released from the endosome into the cytoplasm of the host cell for infection.

[0236] The function of the M2 channel can be inhibited by antiviral drugs, such as amantadine and rimantadine, which prevent the virus from infecting the host cell. Such antiviral drugs usually bind the transmembrane region of the M2 protein and sterically block the ion channel created by the M2 protein, which prevents protons from entering and uncoating the virion.

[0237] The M2 protein for use in the compositions and methods of the invention can that include at least a portion of SEQ ID NO: 509 encoded by SEQ ID NO: 510 or at least a portion of SEQ ID NO: 543, encoded by SEQ ID NO: 602. The M2 protein can further include at least one member selected from the group consisting of SEQ ID NO: 511, SEQ ID NO: 515, SEQ ID NO: 530; SEQ ID NO: 535 (Flu A H5N1 M2e, 2004 Viet Nam Isolate with serine replacing cysteine); SEQ ID NO: 536 (Flu A H5N1 M2e, 2004 Viet Nam Isolate); SEQ ID NO: 539 (Flu A H5N1 M2e, Hong Kong 97 Isolate with serine replacing cysteine); SEQ ID NO: 538 (Flu A H5N1 M2e, Hong Kong 97 Isolate); SEQ ID NO: 539 (Flu A H7N2 M2e Chicken/New York 95 Isolate with serine replacing cysteine); SEQ ID NO: 540 (Flu A H7N2 M2e, Chicken/New York 95 Isolate); SEQ ID NO: 541 (Flu A H9N2 M2e, Hong Kong 99 Isolate with serine replacing cysteine); and SEQ ID NO: 542 (Flu A, Hong Kong 99 Isolate). Certain cysteine residues, for example, amino acids 16 and 18 of SEQ ID NO: 536; amino acids 17 and 19 of SEQ ID NOS: 538, 540 and 542 in the naturally occurring sequence of at least a portion of M2 protein are replaced with a serine (see, SEQ ID NOS: 537, 539, 541 and 543, respectively).

[0238] The compositions comprising a flagellin component that is at least a portion of a flagellin, wherein the flagellin component includes at least one cysteine residue and whereby the flagellin component activates a Toll-like Receptor 5 that further includes an antigen (e.g., a maturational cleavage site peptide, protein portion of HA, such as HA1-1, HA1-2) can be co-administered or admixed with another flagellin component that is at least a portion of a flagellin, wherein the flagellin component includes at least one cysteine residue and whereby the flagellin component activates a Toll-like Receptor 5 that further includes a different, distinct antigen (e.g., M2e) or a fusion protein of a TLR agonist and an antigen (e.g., STF2.HA1-1, STF2.HA1-2, STF2Δ.HA1-1, STF2Δ.HA1-2, STF2.M2e, STF2.4×M2e, STF2Δ.M2e, STF2Δ.4×M2e).

[0239] The antigen included in the compositions and employed in the methods of the invention can be at least a portion of a microbial-related antigen, for example, antigens of pathogens, such as viruses, fungi or bacteria. Antigens can also be microorganism-related, and other disease-related antigens, such as antigens associated with allergies and cancer. The antigen can also be at least a portion of an antigen of a bacteria, a virus, a fungi, a yeast, a protozoa, a metazoa, a tumor, a malignant cell, a plant cell, an animal cell, a hormone and an amyloid-β peptide. The antigen can be a peptide, a polypeptide, a lipoprotein, a glycoprotein and a mucoprotein.

[0240] The antigen included in the compositions and employed in the methods of the invention can be a pathogen-related antigen. “Pathogen-related antigen,” as used herein, refers to any molecule (e.g., protein, peptide, carbohydrate, lipoprotein, polysaccharide) that is associated with a pathogen. Exemplary pathogen-related antigens include, for example, antigens of vaccinia, avipox virus, turkey influenza virus, bovine leukemia virus, feline leukemia virus, avian influenza, chicken pneumovirosis virus, canine parvovirus, equine influenza, FHV, Newcastle Disease Virus (NDV), Chicken/Pennsylvania/1/83 influenza virus, infectious bronchitis virus; Dengue virus, measles virus, Rubella virus, pseudorabies, Epstein-Barr Virus, HIV, SIV, EHV, BHV, HCMV, Hantaan, C. tetani, mumps, Morbillivirus, Herpes Simplex Virus type 1, Herpes Simplex Virus type 2, Human cytomegalovirus, Hepatitis A Virus, Hepatitis B Virus, Hepatitis C Virus, Hepatitis E Virus, Respiratory Syncytial Virus, Human Papilloma Virus, Influenza Virus, Salmonella, Neisseria, Borrelia, Chlamydia, Bordetella, Plasmodium (e.g., Plasmodium falciparum and Plasmodium vivax), Toxoplasma, Cryptococcus, Streptococcus, Staphylococcus, Haemophilus, Diptheria, Tetanus, Pertussis, Escherichia, Candida, Aspergillus, Entamoeba, Giardia and Trypanasoma.

[0241] The antigen included in the compositions and employed in the methods of the invention can include bacterial capsular antigens. Exemplary bacterial capsular antigens include, for example, at least one member selected from the group consisting of a Group B Streptococcus, including Streptococcus agalactiae, capsular polysaccharides type Ia, Ib, Ia/c, II, III, IV, V and VI; Streptococcus pneumoniae capsular polysaccharides types 1, 2, 3, 4, 5, 6A, 6B, 7F, 9N, 9V, 10A, 11A, 12F, 14, 15B, 17F, 18C, 19A, 20, 22F, 23F, and 33F or any combination of these (typing according to the Danish system); Stapylococcus aureus capsular polysaccharides type 5, 8 and 336; Bacillus anthracis vegetative state capsular poly gamma D glutamic acid; Mycobacteria tuberculosis lipo-arabino mannan capsule; Plasmodium flaciparum surface oligosaccharide; Neisseria meningitidis capsular polysaccharides of group A, B, C, X, Y and W135 or any combination thereof.

[0242] Compositions comprising the flagellin component that is at least a portion of a flagellin, wherein the flagellin component includes at least one cysteine residue and whereby the flagellin component activates a Toll-like Receptor 5 can include an antigen that is produced by chemical modification of the side-chains of the antigen (e.g., capsular antigens, pathogen-related antigens, influenza antigens, flavivirus antigens) in a manner that generates an active group that is coupled (also referred to herein as chemical conjugation) to a compatible reactive group created on the substituted flagellins of the invention (see infra). Derivatization (modification) of the capsular material is carried out so that a small minority of the side-chains are modified (about 5%) to avoid destruction of the majority of immunoreactive structures on the capsular material.

[0243] The antigen included in the compositions and employed in the methods of the invention can be at least a portion of at least one member selected from the group consisting of a West Nile viral protein, a Langat viral protein, a Kunjin viral protein, a Murray Valley encephalitis viral protein, a Japanese encephalitis viral protein, a Tick-borne encephalitis viral protein, Dengue 1 viral protein, Dengue 2 viral protein, Dengue 3 viral protein, Dengue 4 viral protein, hepatitis C viral protein and a Yellow fever viral protein (see, for example, PCT/US2006/001623 (WO2006/078657)).

[0244] The genus flavivirus is in the virus family Flaviviridae and consists of about 70 viruses. Mosquito or ticks transmit most of these viruses. Several flaviviruses are significant human pathogens, including the four dengue viruses (Den1, Den2, Den3 and Den4), yellow fever (YF), Japanese encephalitis (JE), West Nile (WN, also referred to herein as “WNV”) and Tick-borne encephalitis (TBE) (Weaver S. C., et al., Nat Rev Microbiol 10: 789-801 (2004)). The flavivirus genus is divided into a number of serogroups based on cross-neutralization tests, including the dengue serogroup that contains four serologically and genetically distinct viruses termed DEN-1, DEN-2, DEN-3 and DEN-4.

[0245] Flaviviruses are small, enveloped viruses with icosahedral capsids. The flavivirus genome is a single-stranded positive-sense RNA (about 11 kb) that is directly translated by the host cell machinery following infection. The viral genome is translated as a single polypeptide that undergoes co- and post-translational cleavage by viral and cellular enzymes to generate three structural proteins of the flavivirus (the capsid (C), the membrane (M) and the envelope (E) proteins); and seven nonstructural proteins (NS1, NS2A, NS2B, NS3, NS4A, NS4B, and NS5) (Weaver, et al., Annu Rev Microbiol 1990:44-649 (2004)). The viral capsid is composed of the C-protein, while both the M- and envelope proteins are located on the envelope surface of the virion (Weaver, S. C., et al., Nat. Rev. Microbiol. 10:789-801 (2004); Chambers et al., Annu Rev. Microbiol. 44: 649-688 (1990)). A major immunogen for flaviviruses is the membrane envelope protein.

[0246] A flavivirus can enter a host cell when the viral envelope protein binds to a receptor and responds by conformational rearrangement to the reduced pH of an endosome. The conformational change induces fusion of viral and host-cell membranes.

[0247] The envelope of a flavivirus may function as a receptor binding protein and to facilitate fusion of the virus and host cell membrane. Envelope proteins of flaviviruses have common structural (domains I, II and III) and functional features (receptor binding of virus and host cell and fusion functions) and are class II fusion glycoproteins (Lescar et al., Cell 105:137-148 (2001)).

[0248] In the pre-fusion conformation, envelope proteins form homodimers on the outer surface of the virus particles (Rey, et al., Nature 375:291-298); Kuhn, et al., Cell 108:717-725 (2002); Mukhopadhyay, et al., Science 302:248 (2003)). Each envelope protein monomer folds into three structural domains (domains I, II and III) predominantly composed of β-strands. Domain I (also referred to herein as “I” or “DI”) is centrally located in the structure and has an N-glycosylation site in glycosylated envelope proteins. Domain II (also referred to herein as “II” or “DII”) of the envelope protein promotes dimerization and has a fusion loop that inserts into the target host membrane during the pH-dependent fusion of the virus (Modis, et al., Nature 427:313-319 (2004); Bressanelli, et al., EMBO J 23:728-738 (2004)). Domain III (also referred to herein as “III” or “DIII”) is at the carboxy-terminus of the envelope protein. Domain III is also referred to as “domain B” in earlier antigenic mapping studies. Domain III has several epitopes that can elicit virus-neutralizing antibodies (Roehrig, Adv Virus Res 59:141-175 (2003)).

[0249] Domain I of the Tick-borne encephalitis envelope protein corresponds to amino acids 1-51, 137-189 and 285-302 of SEQ ID NO: 775; domain II of the Tick-borne encephalitis envelope protein of SEQ ID NO: 775 corresponds to amino acids 52-136 and 190-284; and domain III corresponds to amino acids 303-395 of SEQ ID NO: 775. (Rey, F. A., et al., Nature 375:291-298 (1995)). SEQ ID NO: 775 is encoded by SEQ ID NO: 776. Domain I of the Dengue 2 flavivirus envelope protein corresponds to amino acids 1-52, 132-193 and 280-296 of SEQ ID NO: 761; domain II corresponds to amino acids 53-131 and 194-279 of SEQ ID NO: 761; and domain III corresponds to amino acids 297-495 of SEQ ID NO: 761 (Modis, Y., et al., Nature 427:313-319 (2004)). The location of domains I, II and III of other flavivirus (e.g., West Nile virus, Japanese encephalitis, Dengue 1 virus, Dengue 3 virus and Dengue 4 virus) is based on homology of the Tick-borne encephalitis envelope protein domains and the Dengue 2 envelope protein domains. Thus, reference herein to domains of flavivirus proteins, in particular, flaviviruses other than Tick-borne encephalitis flavivirus envelope proteins and Dengue 2 flavivirus envelope proteins, are based on homology to domains in the Tick-borne encephalitis flavivirus envelope protein and the Dengue 2 flavivirus envelope protein.

[0250] The domain III of the envelope protein of the DEN flavivirus encodes the majority of the flavivirus type-specific contiguous critical/dominant neutralizing epitopes (Roehring, J. T., Adv. Virus Res. 59:141 (2003)), including the four DEN (DEN1, DEN2, DEN3, DEN4) viruses. Flavivirus envelope proteins are highly homologous. Exemplary envelope protein sequences are SEQ ID NOS: 640, 761, 763, 765, 767 and 772.

[0251] West Nile virus (WNV) is a single-stranded positive sense RNA envelope virus. It was first isolated and identified in the West Nile region of Uganda in 1937 from a febrile female adult (Smithburn, et al., Am J Trop Med Hyg 3:9-18 (1954)).

[0252] Japanese encephalitis (JE) virus is localized in Asia and northern Australia (about 50,000 cases with about 10,000 deaths annually).

[0253] The Dengue (DEN) disease is caused by four mosquito-borne, serologically related flaviviruses known as DEN-1 (also referred to herein as “Den1” or Den 1”), DEN-2 (also referred to herein as “Den2” or “Den 2”), DEN-3 (also referred to herein as “Den3” or “Den 3”), and DEN-4 (also referred to herein as “Den4” or Den 4″). The compositions, fusion proteins and polypeptides of the invention can include Den 1 SEQ ID NO.: 621; Den 1 PR 94 (Puerto Rico, 1994) SEQ ID NO: 622; Den 3 SEQ ID NO: 624; and Den 4 SEQ ID NO: 625. SEQ ID NOS: 621, 622, 623, 624 and 625 are portions of domain III of Den1, Den2, Den3 and Den4 flaviviruses.

[0254] “EI,” “EII,” and “EIII,” as used herein, refer to domains I, II and III, respectively, of the West Nile flavivirus envelope protein. “JEI,” “JEII,” and “JEIII,” as used herein, refer to domains I, II and III, respectively, of the Japanese encephalitis flavivirus envelope protein. “Den1 I,” “Den1 II,” and “Den1 III,” as used herein refer to domains I, II and III, respectively, of the Dengue 1 flavivirus envelope protein. Likewise, designations for the domains of envelope proteins of other flaviviruses are referenced by the flavivirus name followed by the domain number (e.g., (Tick-borne) TBI (Tick-borne), TBII, TBIII, Den2 I, Den2 II, Den2 III).

[0255] The portion of an envelope protein of a flavivirus can include at least one member selected from the group consisting of at least a portion of domain I, at least a portion of domain II and at least a portion of domain III. When a domain is designated with a “+,” for example “EIII+” or “JEIII+,” the portion of the envelope protein referenced as “III” is one component of the total of that domain plus at least one of at least a portion of either or both of domains I and II. For example, “EIII+,” as used herein, means the compositions, fusion proteins and polypeptides of the invention include domain III and at least a portion of domain I. “EIII+” is also referred to as “EI/III.” “JEIII+” is also referred to as “JEI/III.” Similarly, when compositions include domains of envelope proteins of flavivirus, the domains can be any combination of domains I, II, and III and can be designated based on the domain. For example, EI/II includes domain I and II of the West Nile flavivirus. The absence of a “+” in reference to a domain (e.g., EIII, JEIII, Den1 III) of an envelope protein employed in the compositions, fusion proteins and polypeptides of the invention means that the composition, fusion protein and polypeptide includes the referenced domain. For example, “Den1 III” means the compositions, fusion proteins and compositions include domain III, not domains I and II, of the Dengue 1 virus.

[0256] The West Nile viral envelope protein can include at least a portion of at least one member selected from the group consisting of SEQ ID NO: 608, which is an EIII+ amino acid sequence, the italicized amino acids are domain I of the envelope protein and the remaining sequence is domain III of the envelope protein; SEQ ID NO: 609, West Nile virus, Stanford, Conn., also referred to as “West Nile S”; SEQ ID NO: 610, West Nile virus, New York, N.Y., also referred to as “West Nile NY”; and SEQ ID NO: 611, SEQ ID NO: 608 is encoded by SEQ ID NO: 612.

[0257] The Langat virus envelope protein for use in the compositions, fusion proteins and polypeptides of the invention can include at least a portion of SEQ ID NO: 613. The Kunjin virus envelope protein can include at least a portion of SEQ ID NO: 614. The Murray Valley encephalitis envelope protein can include at least a portion of SEQ ID NO: 615. The Japanese encephalitis envelope protein can include at least one member selected from the group consisting of at least a portion of SEQ ID NO: 616 and SEQ ID NO: 617. The Tick-borne encephalitis envelope protein can include at least a portion of SEQ ID NO: 618. The Yellow fever virus envelope protein can include at least a portion of SEQ ID NO: 619. The envelope protein of a flavivirus can include at least a portion of at least one member selected from the group consisting of SEQ ID NO: 620 and SEQ ID NO: 641. SEQ ID NOS: and 643 613, 614, 615, 616, 617, 618, 619, 620 and 641 are portions of domain III of the viral envelope protein.

[0258] The antigen can be chemically conjugated to flagellin components and Toll-like Receptor agonist components. Chemical conjugation (also referred to herein as “chemical coupling”) can include conjugation by a reactive group, such as a thiol group (e.g., a cysteine residue) or by derivatization of a primary (e.g., a amino-terminal) or secondary (e.g., lysine) group. Different crosslinkers can be used to chemically conjugate TLR ligands (e.g., TLR agonists) to proteins (e.g., antigens, compositions of the invention, HA and M2e constructs of the invention) or other molecules (e.g., nucleic acids, polysaccharides). Exemplary cross linking agents are commerically available, for example, from Pierce (Rockland, Ill.). Methods to chemically conjugate the antigen to the flagellin component are well-known and include the use of commercially available cross-linkers, such as those described herein.

[0259] For example, conjugation of peptide or protein antigens to a flagellin component or a Toll-like Receptor agonist component of the invention can be through at least one cysteine residue of the flagellin component or the Toll-like Receptor component and at least one cysteine residue of a protein (e.g., an influenza antigen, such as HA, M2e) employing established techniques. The protein can be derivatized with a homobifunctional, sulfhydryl-specific crosslinker; the protein is then desalted to remove the unreacted crosslinker; and then the peptide or protein partner added and conjugated via at least one cysteine residue cysteine. Exemplary reagents for use in the conjugation methods can be purchased commercially from Pierce (Rockland, Ill.), for example, BMB (Catalog No: 22331), BMDB (Catalog No: 22332), BMH (Catalog No: 22330), BMOE (Catalog No: 22323), BM[PEO]₃ (Catalog No: 22336), BM[PEO]₄ (Catalog No:22337), DPDPB (Catalog No: 21702), DTME (Catalog No: 22335), HBVS (Catalog No: 22334).

[0260] Alternatively, cysteine-containing proteins and antigens can also be conjugated to lysine residues on flagellin components, flagellin, Toll-like Receptor agonist components and Toll-like Receptor agonists of the invention. A protein containing no cysteine residues is derivatized with a heterobifunctional amine and sulfhydryl-specific crosslinker. After desalting, the cysteine-containing partner is added and conjugated. Exemplary reagents for use in the conjugation methods can be purchased from Pierce (Rockland, Ill.), for example, AMAS (Catalog No: 22295), BMPA (Catalog No. 22296), BMPS (Catalog No: 22298), EMCA (Catalog No: 22306), EMCS (Catalog No: 22308), GMBS (Catalog No: 22309), KMUA (Catalog No: 22211), LC-SMCC (Catalog No: 22362), LC-SPDP (Catalog No: 21651), MBS (Catalog No: 22311), SATA (Catalog No: 26102), SATP (Catalog No: 26100), SBAP (Catalog No: 22339), SIA (Catalog No: 22349), SIAB (Catalog No: 22329), SMCC (Catalog No: 22360), SMPB (Catalog No: 22416), SMPH (Catalog No. 22363), SMPT (Catalog No: 21558), SPDP (Catalog No: 21857), Sulfo-EMCS (Catalog No: 22307), Sulfo-GMBS (Catalog No: 22324), Sulfo-KMUS (Catalog No: 21111), Sulfo-LC-SPDP (Catalog No: 21650), Sulfo-MBS (Catalog No: 22312), Sulfo-SIAB (Catalog No: 22327), Sulfo-SMCC (Catalog No: 22322), Sulfo-SMPB (Catalog No: 22317), Sulfo-LC-SMPT (Catalog No.: 21568).

[0261] Additionally, or alternatively, peptide or protein antigens can also be conjugated to flagellin components or Toll-like Receptor agonist components of the invention via at least one lysine residue on both conjugate partners. The two conjugate partners are combined along with a homo-bifunctional amine-specific crosslinker. The appropriate hetero-conjugate is then purified away from unwanted aggregates and homo-conjugates. Exemplary reagents for use in the conjugation methods can be purchased from Pierce (Rockland, Ill.), for example, BSOCOES (Catalog No: 21600), BS₃ (Catalog No: 21580), DFDNB (Catalog No: 21525), DMA (Catalog No: 20663), DMP (Catalog No: 21666), DMS (Catalog No: 20700), DSG (Catalog No: 20593), DSP (Catalog No: 22585), DSS (Catalog No: 21555), DST (Catalog No: 20589), DTBP (Catalog No: 20665), DTSSP (Catalog No: 21578), EGS (Catalog No: 21565), MSA (Catalog No: 22605), Sulfo-DST (Catalog No: 20591), Sulfo-EGS (Catalog No: 21566), THPP (Catalog No: 22607).

[0262] Similarly, peptide or protein antigens can be conjugated to flagellin components or Toll-like Receptor agonist components of the invention via at least one carboxyl group (e.g., glutamic acid, aspartic acid, or the carboxy-terminus of the peptide or protein) on one partner and amines on the other partner. The two conjugation partners are mixed together along with the appropriate heterobifunctional crosslinking reagent. The appropriate hetero-conjugate is then purified away from unwanted aggregates and homo-conjugates. Exemplary reagents for use in the conjugation methods can be purchased from Pierce (Rockland, Ill.), for example, AEDP (Catalog No: 22101), EDC (Catalog No: 22980) and TFCS (Catalog No: 22299).

[0263] In addition, carbohydrate antigens can be conjugated to proteins, flagellin components, flagellin, Toll-like Receptor agonist components and Toll-like Receptor agonists of the invention via at least one cysteine residue in the protein employing well-established techniques. For example, the protein is initially derivatized with a heterobifunctional crosslinker containing at least one sulfhydryl-specific group and at least one hydrazide group. The polysaccharide or oligosaccharide is then treated with an oxidizing agent such as sodium meta-periodate to generate terminal aldehyde groups. The oxidized carbohydrate is then added to the derivatized protein and conjugation to the aldehyde occurs via the hydrazide on the crosslinker. Exemplary reagents for use in the conjugation methods can be purchased from Pierce (Rockland, Ill.), for example, BMPH (Catalog No: 22297), EMCH (Catalog No: 22106), KMUH (Catalog No: 22111) and PDPH (Catalog No: 22301).

[0264] Further lipopeptides can be conjugated to protein antigens, flagellin components or Toll-like Receptor components or Toll-like Receptor agonists of the invention via amino-acid side chains on the peptide chain. Similar strategies and reagents, as described above for peptide conjugation to proteins, would be employed.

[0265] TLRs can be activated by nucleic acids. For example, TLR3 is activated by double-stranded (ds) RNA; TLR7 and TLR8 are activated by single-stranded (ss) RNA; and TLR9 is activated by CpG DNA sequences. Several different techniques can be employed to conjugate Toll-like Receptor agonist components of nucleic acid TLRs to protein antigens. For example, for un-modified DNA molecule, the 5′ phosphate group can be modified with the water-soluble carbodiimide EDC (Pierce; Rockford, Ill., Catalog No: 22980) followed by imidazole to form a terminal phosphoylimidazolide. A terminal amine can then be substituted for this reactive group by the addition of ethylenediamine. The amine-modified nucleic acid can then be conjugated to a cysteine on a protein using a heterobifunctional maleimide (cysteine-specific) and NHS-ester (lysine-specific) crosslinker, as described above for peptide-protein conjugation.

[0266] Alternatively, or additionally, a sulfhydryl group can be incorporated at the 5′ end by substituting cystamine for ethylenediamine in the second step. After reduction of the disulfide bond, the free sulfhydryl can be conjugated to cysteines on proteins, flagellin components, flagellin, Toll-like Receptor agonist components and Toll-like Receptor agonists employing a homo-bifunctional maleimide-based crosslinker, or to lysines using a heterobifunctional crosslinker, as described above. Alternately, or additionally, synthetic oligonucleotides can be synthesized with modified bases on either the 5′ or 3′ end. These modified bases can include primary amine or sulfhydryl groups which can be conjugated to proteins using the methods described above. The 3′ end of RNA molecules may be chemically modified to allow coupling with proteins or other macromolecules. The diol on the 3′-ribose residue may be oxidized using sodium meta-periodate to produce an aldehyde group. The aldehyde may then be conjugated to proteins using a hydrazide-containing crosslinker, such as MPBH (Pierce; Rockland, Ill., Catalog No: 22305), which covalently modifies the carbonyl group, and then conjugates to free thiols on proteins via a maleimide group. Alternatively, the 3′ hydroxyl group may be derivatized directly with an isocyanate-containing crosslinker, such as PMPI (Pierce; Rockland, Ill., Catalog No: 28100), which also contains a maleimide group for conjugation to protein sulfhydryls.

[0267] Synthetic small-molecule TLR ligands (e.g., Toll-like Receptor agonists, Toll-like Receptor antagonists) have been identified. For example, imiquimod, which potently activates TLR7, and resiquimod, an activator of both TLR7 and TLR8. Analogs of these compounds with varying levels of potency and specificity have been synthesized. The ability to conjugate a small molecule TLR agonist to an antigen of interest can depend on the chemical nature of the TLR ligand. Some TLR ligands may have active groups that can be exploited for chemical conjugation. For example, imiquimod, as well as its analog gardiquimod (InvivoGen; San Diego, Calif.) and the TLR7-activating adenine analog CL087 (InvivoGen, San Diego, Calif.), have primary amine groups (—NH₂), which can be targets for derivatization by crosslinkers containing imidoesters or NHS esters. In another strategy, gardiquimod contains an exposed hydroxyl (—OH) group, which can be derivatized by an isocyanate-containing crosslinker, such as PMPI (Pierce; Rockland, Ill. Catalog No: 28100) for subsequent crosslinking to protein sulfhydryl groups.

[0268] In addition, custom synthesis of derivatives of small-molecule TLR ligands can be arranged in order to attach novel functional groups at different positions in the molecule to facilitate crosslinking Custom derivatives can also include groups, such as maleimides, which can then be used for direct linking to protein antigens.

[0269] Chemical conjugation of an antigen to the flagellin component can result in increased aqueous solubility of the antigen (e.g., an essentially hydrophobic antigen, such as a maturational cleavage site antigen) as a component of the composition.

[0270] The composition comprising a flagellin component that is at least a portion of a flagellin, wherein the flagellin component includes at least one cysteine residue and whereby the flagellin component activates a Toll-like Receptor 5 can include a cysteine residue in the hypervariable region of the flagellin component.

[0271] At least one cysteine residue substitutes for at least one amino acid in a naturally occurring flagellin amino acid sequence flagellin component. The cysteine residue can substitute for at least one amino acid selected from the group consisting of amino acid 1, 237, 238, 239, 240, 241 and 495 of SEQ ID NO: 810; at least one amino acid selected from the group consisting of amino acid 1, 240, 241, 242, 243, 244 and 505 of SEQ ID NO: 312; at least one amino acid selected from the group consisting of amino acid 1, 237, 238, 239, 240, 241 and 504 of SEQ ID NO: 503; at least one amino acid selected from the group consisting of amino acid 1, 211, 212, 213 and 393 of SEQ ID NO: 813; at least one amino acid selected from the group consisting of amino acid 1, 151, 152, 153, 154 and 287 of SEQ ID NO: 818; at least one amino acid selected from the group consisting of amino acid 1, 238, 239, 240, 241, 242, 243 and 497 of SEQ ID NO: 501; at least one amino acid selected from the group consisting of amino acid 1, 237, 238, 239, 240, 241 and 495 of SEQ ID NO: 810.

[0272] The flagellin component or Toll-like Receptor agonist component can include at least a portion of a naturally occurring flagellin amino acid sequence in combination with the cysteine residue.

[0273] The composition of the invention wherein the cysteine residue substitutes for at least one amino acid in a naturally occurring flagellin amino acid sequence flagellin component, or wherein the flagellin component includes at least a portion of a naturally occurring flagellin amino acid sequence in combination with the cysteine residue, can activate a Toll-like Receptor 5. For example, a cysteine residue can be placed within the D1/D2 domain proximate to the amino-terminus and carboxy-terminus, remote to the TLR5 recognition site (see, for example, FIGS. 75 and 76). Alternatively, or additionally, the cysteine residue can be placed at the distal point of the hypervariable domain (see, for example, FIGS. 75 and 76) at about amino acid 237, about 238, about 239, about 240 and about 241 of SEQ ID NO: 810. Substituting polar or charged amino acids is preferable to substituting hydrophobic amino acids with cysteine residues. Substitution within the TLR5 recognition site is least preferable.

[0274] Flagellin from Salmonella typhimurium STF1 (FliC) is depicted in SEQ ID NO: 810 (Accession No: P06179). The TLR5 recognition site is amino acid about 79 to about 117 and about 408 to about 439. Cysteine residues can substitute for or be included in combination with amino acid about 408 to about 439 of SEQ ID NO: 810; amino acids about 1 and about 495 of SEQ ID NO: 810; amino acids about 237 to about 241 of SEQ ID NO: 810; and/or amino acids about 79 to about 117 and about 408 to about 439 of SEQ ID NO: 810.

[0275] Salmonella typhimurium flagellin STF2 (FljB) is depicted in SEQ ID NO: 312. The TLR5 recognition site is amino acids about 80 to about 118 and about 420 to about 451 of SEQ ID NO: 312. Cysteine residues can substitute for or be included in combination with amino acids about 1 and about 505 of SEQ ID NO: 312; amino acids about 240 to about 244 of SEQ ID NO: 312; amino acids about 79 to about 117 and/or about 419 to about 450 of SEQ ID NO: 312.

[0276] Salmonella muenchen flagellin is depicted in SEQ ID NO: 503 (Accession No: #P06179). The TLR5 recognition site is amino acids about 79 to about 117 and about 418 to about 449 of SEQ ID NO: 503. Cysteine residues can substitute for or be included in combination with amino acids about 1 and about 504 of SEQ ID NO: 503; about 237 to about 241 of SEQ ID NO: 503; about 79 to about 117; and/or about 418 to about 449 of SEQ ID NO: 503.

[0277] Escherichia coli flagellin is depicted in SEQ ID NO: 501 (Accession No: P04949). The TLR5 recognition site is amino acids about 79 to about 117 and about 410 to about 441 of SEQ ID NO: 501. Cysteine residues can substitute for or be included in combination with amino acids about 1 and about 497 of SEQ ID NO: 501; about 238 to about 243 of SEQ ID NO: 501; about 79 to about 117; and/or about 410 to about 441 of SEQ ID NO: 501.

[0278] Pseudomonas auruginosa flagellin is depicted in SEQ ID NO: 813. The TLR5 recognition site is amino acids about 79 to about 114 and about 308 to about 338 of SEQ ID NO: 813. Cysteine residues can substitute for or be included in combination with amino acids about 1 and about 393 of SEQ ID NO: 813; about 211 to about 213 of SEQ ID NO: 813; about 79 to about 114; and/or about 308 to about 338 of SEQ ID NO: 813.

[0279] Listeria monocytogenes flagellin is depicted in SEQ ID NO: 817. The TLR5 recognition site is amino acids about 78 to about 116 and about 200 to about 231 of SEQ ID NO: 817. Cysteine residues can substitute for or be included in combination with amino acids about 1 and about 287 of SEQ ID NO: 817; about 151 to about 154 of SEQ ID NO: 817; about 78 to about 116; and/or about 200 to about 231 of SEQ ID NO: 817.

[0280] Experimentally defined TLR5 recognition sites on STF2 have been described (see, for example, Smith, K. D., et al., Nature Immunology 4:1247-1253 (2003) at amino acids about 79 to about 117 and about 420 to about 451. In addition, Smith, K. D., et al., Nature Immunology 4:1247-1253 (2003), based on sequence homology, identified TLR5 recognition sites on other flagellins, such as STF1 at amino acids about 79 to about 117, about 408 to about 439; P. aeruginosa at amino acids about 79 to about 117, about 308 to about 339; L. pneumophila at amino acids about 79 to about 117, about 381 to about 419; E. coli at amino acids about 79 to about 117, about 477, about 508; S. marcesens at amino acids about 79 to about 117, about 265-about 296; B. subtilus at amino acids about 77 to about 117, about 218 to about 249; and L. monocytogenes at amino acids about 77 to about 115, about 200 to about 231.

[0281] The high-resolution structure STF1 (FliC) (SEQ ID NO: 810) has been determined and can be a basis for analysis of TLR5 recognition by a flagellin and the location of cysteine substitutions/additions. Flagellin resembles a “boomerang,” with the amino- and carboxy-termini at the end of one arm (see, for example FIG. 77). The TLR5 recognition site is located roughly on the outer side of the boomerang just below the bend toward the amino- and carboxy-termini of the flagellin. The hinge region, which is not required for TLR5 recognition, is located above the bend. The region of greatest sequence homology of flagellins is in the TLR5 recognition site. The next region of sequence homology is in the D1 and D2 domains, which include the TLR5 recognition site and the amino- and carboxy-termini. The D1 and D2 domains, with or without a linker, is STF2Δ □(□□SEQ ID NO: 499), which can activate TLR5. The region of least sequence homology between flagellins is the hypervariable region.

[0282] It is believed that the ability of the flagellin component or Toll-like Receptor agonist component to activate TLR5 can be accomplished by maintaining the conjugation sites (cysteine residues substituted for at least one amino acid in a naturally occurring flagellin amino acid sequence flagellin component or at least a portion of a naturally occurring flagellin amino acid sequence in combination with the cysteine residue) remote from the TLR5 or TLR recognition site. For example, for STF1 (SEQ ID NO: 810), for which a high resolution structural determination is available, this may be achieved in the D1 domain, D2 domain or in the hinge region. In the D1/D2 domain the amino- and carboxy-termini can be remote (also referred to herein as “distal”) from the TLR5 recognition site, and moving away from either the amino or carboxy terminus may bring the conjugation site closer to the recognition site and may interfere with TLR5 activity. In the hinge region amino acids about 237 to about 241 of SEQ ID NO: 810, are approximately at the other tip of the “boomerang” and are about the same distance from the TLR5 recognition site as the amino- and carboxy-termini. This site may also be a location that maintains TLR5 recognition.

[0283] Amino acid identity can be taken into consideration for the location of conjugation sites. Polar and charged amino acids (e.g., serine, aspartic acid, lysine) are more likely to be surface exposed and amenable to attachment of an antigen. Hydrophobic amino acids (e.g., valine, phenalalanine) are more likely to be buried and participate in structural interactions and should be avoided.

[0284] Compositions that include flagellin components with cysteine residues or Toll-like Receptor agonist components with cysteine residues activate TLR5 and can be chemically conjugated to antigens.

[0285] The compositions and methods of employing the compositions of the invention can further include a carrier protein. The carrier protein can be at least one member selected from the group consisting of a tetanus toxoid, a Vibrio cholerae toxoid, a diphtheria toxoid, a cross-reactive mutant of diphtheria toxoid, a E. coli B subunit of a heat labile enterotoxin, a tobacco mosaic virus coat protein, a rabies virus envelope protein, a rabies virus envelope glycoprotein, a thyroglobulin, a heat shock protein 60, a keyhole limpet hemocyanin and an early secreted antigen tuberculosis-6.

[0286] The composition comprising a flagellin component that is at least a portion of a flagellin, wherein the flagellin component includes at least one cysteine residue and whereby the flagellin component activates a Toll-like Receptor 5 can include at least one lysine of the flagellin component that has been substituted with at least one member selected from the group consisting of an arginine residue, a serine residue and a histidine residue.

[0287] In an additional embodiment, the invention is a composition comprising a Toll-like Receptor agonist component that is at least a portion of a Toll-like Receptor agonist, wherein the Toll-like Receptor agonist component includes at least one cysteine residue in a position where a cysteine residue does not occur in the native Toll-like Receptor agonist, whereby the Toll-like Receptor agonist component activates a Toll-like Receptor. “Component,” as used herein in reference to a Toll-like Receptor agonist component, means at least part of or the entirety of a Toll-like Receptor agonist.

[0288] In one embodiment, the cysteine residue in the composition comprising a Toll-like Receptor agonist component that is at least a portion of a Toll-like Receptor agonist, wherein the Toll-like Receptor agonist component includes at least one cysteine residue in a position where a cysteine residue does not occur in the native Toll-like Receptor agonist, whereby the Toll-like Receptor agonist component activates a Toll-like Receptor, substitutes for at least one amino acid in a naturally occurring amino acid sequence of a Toll-like Receptor agonist component. The cysteine can substitute for at least one amino acid remote to the Toll-like Receptor recognition site of the Toll-like Receptor agonist component.

[0289] In another embodiment, the Toll-like Receptor agonist component includes at least a portion of a naturally occurring Toll-like Receptor agonist amino acid sequence in combination with a cysteine residue. The cysteine residue in combination with the naturally occurring Toll-like Receptor agonist can be remote to the Toll-like Receptor recognition site of the Toll-like Receptor agonist component.

[0290] The composition comprising a Toll-like Receptor agonist component that is at least a portion of a Toll-like Receptor agonist, wherein the Toll-like Receptor agonist component includes at least one cysteine residue in a position where a cysteine residue does not occur in the native Toll-like Receptor agonist, whereby the Toll-like Receptor agonist component activates a Toll-like Receptor can further include at least a portion of at least one antigen (e.g., an influenza antigen, such as a influenza integral membrane protein antigen, HA, HA1-1, HA1-2, M2, M2e).

[0291] In still another embodiment, the invention is a composition comprising a flagellin component that is at least a portion of a flagellin, wherein at least one lysine of the flagellin component has been substituted with at least one arginine, whereby the flagellin component activates a Toll-like Receptor 5.

[0292] “Substituted,” as used herein in reference to the flagellin, flagellin component, Toll-like Receptor agonist or Toll-like Receptor agonist component, means that at least one amino acid, such as a lysine of the flagellin component, has been modified to another amino acid residue, for example, a conservative substitution (e.g., arginine, serine, histidine) to thereby form a substituted flagellin component or substituted Toll-like Receptor agonist component. The substituted flagellin component or substituted Toll-like Receptor agonist component can be made by generating recombinant constructs that encode flagellin with the substitutions, by chemical means, by the generation of proteins or peptides of at least a portion of the flagellin by protein synthesis techniques, or any combination thereof.

[0293] The lysine residue that is substituted with an amino acid (e.g., arginine, serine, histidine) can be at least one lysine residue selected from the group consisting of lysine 19, 41, 58, 135, 160, 177, 179, 203, 215, 221, 228, 232, 241, 251, 279, 292, 308, 317, 326, 338, 348, 357, 362, 369, 378, 384, 391 and 410 of SEQ ID NO: 810.

[0294] The flagellin can be a S. typhimurium flagellin that includes SEQ ID NO: 312. The lysine residue that is substituted with an amino acid (e.g., arginine, serine, histidine) can be at least one lysine residue selected from the group consisting of lysine 20, 42, 59, 136, 161, 177, 182, 189, 209, 227, 234, 249, 271, 281, 288, 299, 319, 325, 328, 337, 341, 355, 357, 369, 381, 390, 396, 403, 414 and 422 of SEQ ID NO: 312.

[0295] The flagellin can be an E. coli fliC that includes SEQ ID NO: 812. The flagellin can be a S. muenchen that include the includes SEQ ID NO: 811. The flagellin can be a P. aeruginosa flagellin that includes SEQ ID NO: 813. The flagellin can be a Listeria monocytogenes flagellin that includes SEQ ID NO: 817.

[0296] The compositions of the invention can include a flagellin that has lysines substituted in a region adjacent to the motif C of the flagellin, the motif N of the flagellin, both the motif C and the motif N of the flagellin, domain 1 of the flagellin, domain 2 of the flagellin or any combination thereof. Motif C and motif N of flagellin and domain 1 and domain 2 of the flagellin can be involved in activation of TLR5 by the flagellin (Murthy, et al., J. Biol. Chem., 279:5667-5675 (2004)).

[0297] Chemical conjugation of a protein, peptide, or polypeptide to another molecule can be by derivatization of a secondary group, such as a lysine. Certain lysine residues in flagellin are near or in domain 1, the motif C or motif N, motifs can be important in binding of the flagellin to TLR5. For example, lysine residues at amino acids 58, 135, 160 and 410 of SEQ ID NO: 810 may be substituted with at least one member selected from the group consisting of an arginine residue, a serine residue and a histidine residue. Derivatization of such lysine residues to, for example, chemically conjugated antigens to flagellins, may decrease the ability or the binding affinity of the flagellin to TLR5 and, thus, diminish an innate immune response mediated by TLR5. Substitution of at least one lysine residue in a flagellin that may be near to regions of the flagellin that are important in mediating interactions with TLR5 (e.g., motif C, motif N, domain 1) with another amino acid (e.g., arginine, serine, histidine) may preserve or enhance flagellin binding to TLR5. In a particular embodiment, the amino acid substitution is a conservative amino acid substitution with at least one member selected from the group consisting of arginine, serine and histidine. Exemplary commercially available reagents for chemical conjugation are described herein.

[0298] Certain lysine residues in flagellin are in the domain (domain 1) and can be important for activation of TLR5. For example, lysine residues at positions 58, 135, 160 and 410 of SEQ ID NO: 810 are in domain 1. Derivatization of such lysine residues to, for example, chemically conjugated antigens, may decrease TLR5 bioactivity and, thus, diminish an innate immune response mediated by TLR5.

[0299] Lysine residues that can be substituted can include lysine residues implicated in TLR5 activation. Lysine residues in motif N (amino acids 95-108 of SEQ ID NO: 810) and/or motif C (amino acids 441-449 of SEQ ID NO: 810) can be suitable for substitution. Substitution of certain lysine residue in the flagellin (e.g., lysine at amino acid position 19, 41) with, for example, an arginine, serine or histidine, can maintain binding of the flagellin to TLR5 and leave other lysines available for chemical conjugate to another molecule, such as an antigen (e.g., protein) or another molecule, such as another protein, peptide or polypeptide.

[0300] The X-ray crystal structure of the F41 fragment of flagellin from Salmonella typhimurium shows the domain structure of flagellin (Samatey, F. A., et al., Nature 410:321 (2001)). The full length flagellin protein contains 4 domains, designated as D0, D1, D2 and D3. Three of these domains are shown in the crystal structure because the structure was made with a proteolytic fragment of full length flagellin. The amino acid sequences of Salmonella typhimurium flagellin for these regions, numbered relative to SEQ ID NO: 810 are as follows:

[0301] D0 contains the regions A1 through A55 and 5451 through R494

[0302] D1 contains the regions N56 through Q176 and T402 through R450

[0303] D2 contains the regions K177 through G189 and A284 through A401

[0304] D3 contains the region Y190 though V283

[0305] Exemplary lysine residues of SEQ ID NO: 810 suitable for substitution with, for example, arginine, histidine, or serine, can include:

[0306] D0 contains 2 lysine residues; K19, K41

[0307] D1 contains 4 lysine residues; K58, K135, K160 and K410 D2 contains 14 lysine residues at positions 177, 179, 292, 308, 317, 326, 338, 348, 357, 362, 369, 378, 384, 391

[0308] D3 contains 8 lysine residues at positions 203, 215, 221, 228, 232, 241, 251, 279

[0309] Exemplary lysine residues suitable for substitution include lysines at positions 58, 135, 160 and 410 of SEQ ID NO: 810 (Jacchieri, S. G., et. al., J. Bacteriol. 185:4243 (2003); Donnelly, M. A., et al., J. Biol. Chem. 277:40456 (2002)). The sequences were obtained from the Swiss-Prot Protein Knowledgebase located online at http://us.expasy.org/sprot/. Lysine residues that can be modified are indicated with a *.

[0310] Exemplary lysine residues of SEQ ID NO: 312 suitable for substitution can include:

[0311] D0—with two lysines at positions 20, 42;

[0312] D1—with five lysines at positions 59, 136, 161, 414, 422;

[0313] D2—with sixteen lysines at positions 177, 182, 189, 299, 319, 325, 328, 337, 341, 355, 357, 369, 381, 390, 396, 403 and

[0314] D3—with seven lysines at positions 209, 227, 234, 249, 271, 281, 288.

[0315] In a further embodiment, the invention is a composition comprising a flagellin component that is at least a portion of a flagellin, wherein at least one lysine of the flagellin component has been substituted with at least one histidine residue, whereby the flagellin component activates a Toll-like Receptor 5.

[0316] In yet another embodiment, the invention is a method of stimulating an immune response in a subject, comprising the step of administering to the subject a composition that includes a flagellin component that is at least a portion of a flagellin, wherein the flagellin component includes at least one cysteine residue and whereby the flagellin component activates a Toll-like Receptor 5.

[0317] In another embodiment, the invention is a method of stimulating protective immunity in a subject, comprising the step of administering to the subject a composition that includes a flagellin component that is at least a portion of a flagellin, wherein the flagellin component includes at least one cysteine residue and whereby the flagellin component activates a Toll-like Receptor 5.

[0318] In yet another embodiment, the invention is a method of stimulating protective immunity in a subject, comprising the step of administering to the subject a composition that includes a flagellin component that is at least a portion of a flagellin, wherein at least one lysine of the flagellin component has been substituted with at least one arginine, whereby the flagellin component activates a Toll-like Receptor 5.

[0319] In still another embodiment, the invention is a method of stimulating an immune response in a subject, comprising the step of administering to the subject a composition that includes a flagellin component that is at least a portion of a flagellin, wherein at least one lysine of the flagellin component has been substituted with at least one serine residue, whereby the flagellin component activates a Toll-like Receptor 5.

[0320] In another embodiment, the invention is a method of stimulating a protective immune response in a subject, comprising the step of administering to the subject a composition that includes a flagellin component that is at least a portion of a flagellin, wherein at least one lysine of the flagellin component has been substituted with at least one serine residue, whereby the flagellin component activates a Toll-like Receptor 5.

[0321] In an additional embodiment, the invention is a method of stimulating an immune response in a subject, comprising the step of administering to the subject a composition that includes a flagellin component that is at least a portion of a flagellin, wherein at least one lysine of the flagellin component has been substituted with at least one histidine residue, whereby the flagellin component activates a Toll-like Receptor 5.

[0322] In a further embodiment, the invention is a method of stimulating protective immunity in a subject, comprising the step of administering to the subject a composition that includes a flagellin component that is at least a portion of a flagellin, wherein at least one lysine of the flagellin component has been substituted with at least one histidine residue, whereby the flagellin component activates a Toll-like Receptor 5.

[0323] Another embodiment of the invention is a method of stimulating an immune response in a subject, comprising the step of administering to the subject a composition that includes a Toll-like Receptor agonist component that is at least a portion of a Toll-like Receptor agonist, wherein the Toll-like Receptor agonist component includes at least one cysteine residue in a position where a cysteine residue does not occur in the native Toll-like Receptor agonist, whereby the Toll-like Receptor agonist component activates a Toll-like Receptor agonist.

[0324] Another embodiment of the invention is a method of stimulating a protective immunity in a subject, comprising the step of administering to the subject a composition that includes a Toll-like Receptor agonist component that is at least a portion of a Toll-like Receptor agonist, wherein the Toll-like Receptor agonist component includes at least one cysteine residue in a position where a cysteine residue does not occur in the native Toll-like Receptor agonist, whereby the Toll-like Receptor agonist component activates a Toll-like Receptor agonist.

[0325] In yet another embodiment, the invention is a composition comprising an antigen component that includes at least a portion of a hemagglutinin maturational cleavage site and an agonist component that includes a Toll-like Receptor agonist (e.g., at least one member selected from the group consisting of a Toll-like Receptor 1 agonist, a Toll-like Receptor 3 agonist, a Toll-like Receptor 5 agonist, a Toll-like Receptor 6 agonist, a Toll-like Receptor 7 agonist and a Toll-like Receptor 9 agonist) wherein the Toll-like Receptor agonist is not a Toll-like Receptor 2 agonist (e.g., the outer membrane protein complex (OMPC), such as OMPC of Neiserria meningitides). The hemagglutinin maturational cleavage site can include at least one member selected from the group consisting of an influenza A hemagglutinin maturational cleavage site, an influenza B hemagglutinin maturational cleavage site and an influenza C hemagglutinin maturational cleavage site.

[0326] In one embodiment, the antigen component and the agonist component of the compositions of the invention can be components of a fusion protein. In another embodiment, the antigen component is chemically conjugated to the agonist component. The agonist component includes a composition comprising a flagellin component that is at least a portion of a flagellin, wherein the flagellin component includes at least one cysteine residue and whereby the flagellin component activates a Toll-like Receptor 5. The antigen component further includes at least a portion of a matrix 2 protein, which can further include a second agonist component that includes at least a portion of a second Toll-like Receptor agonist (e.g., at least a portion of at least one member selected from the group consisting of a Toll-like Receptor 2 agonist, a Toll-like Receptor 3 agonist, a Toll-like Receptor 4 agonist, a Toll-like Receptor 5 agonist, a Toll-like Receptor 6 agonist, a Toll-like Receptor 7 agonist and a Toll-like Receptor 9 agonist). The matrix-2 protein can be fused to the second agonist component or chemically conjugated to a second agonist component.

[0327] An “antigen component,” as used herein, refers to a part or the entirety of an antigen.

[0328] An “agonist component” as used herein, refers to a part or the entirety of an agonist, such as a Toll-like Receptor agonist.

[0329] In an additional embodiment, the invention is a method of stimulating an immune response in a subject, comprising the step of administering to the subject a composition comprising an antigen component that includes at least a portion of a hemagglutinin maturational cleavage site and an agonist component that includes a Toll-like Receptor agonist, wherein the Toll-like Receptor agonist is not a Toll-like Receptor 2 agonist.

[0330] In a further embodiment, the invention is a method of stimulating protective immunity in a subject, comprising the step of administering to the subject a composition comprising an antigen component that includes at least a portion of a hemagglutinin maturational cleavage site and an agonist component that includes a Toll-like Receptor agonist, wherein the Toll-like Receptor agonist is not a Toll-like Receptor 2 agonist.

[0331] In yet another embodiment, the invention is a composition that includes at least a portion of a HA antigen (e.g., the maturational cleavage site) that is fused (e.g., recombinantly) to or chemically conjugated to at least of portion of a hinge region of a flagellin, a flagellin component or in a flagellin in which the hinge region has been deleted; and at least a portion of an M2e protein that is fused (e.g., recombinantly) to or chemically conjugated to a flagellin or a flagellin component, for example, at the amino- or carboxy-terminus of the flagellin or the flagellin component (See, for example, FIG. 77).

[0332] In an additional embodiment, the invention includes a protein, peptide polypeptide having at least about 70%, at least about 75%, at least about 80%, at least about 85%, at least about 90%, at least about 95%, at least about 98% and at least about 99% sequence identity to the proteins, polypeptides and peptides of the invention.

[0333] The percent identity of two amino acid sequences (or two nucleic acid sequences) can be determined by aligning the sequences for optimal comparison purposes (e.g., gaps can be introduced in the sequence of a first sequence). The amino acid sequence or nucleic acid sequences at corresponding positions are then compared, and the percent identity between the two sequences is a function of the number of identical positions shared by the sequences (i.e., % identity=# of identical positions/total # of positions×100). The length of the protein or nucleic acid encoding can be aligned for comparison purposes is at least 30%, preferably, at least 40%, more preferably, at least 60%, and even more preferably, at least 70%, 75%, 80%, 85%, 90%, 95%, 98%, 99% or 100%, of the length of the reference sequence, for example, the nucleic acid sequence of a protein portion of HA (e.g., HA1-1, HA1-2), fusion protein, antigen, or polypeptide.

[0334] The actual comparison of the two sequences can be accomplished by well-known methods, for example, using a mathematical algorithm. A preferred, non-limiting example of such a mathematical algorithm is described in Karlin et al. (Proc. Natl. Acad. Sci. USA, 90:5873-5877 (1993), the teachings of which are hereby incorporated by reference in its entirety). Such an algorithm is incorporated into the BLASTN and BLASTX programs (version 2.2) as described in Schaffer et al. (Nucleic Acids Res., 29:2994-3005 (2001), the teachings of which are hereby incorporated by reference in its entirety). When utilizing BLAST and Gapped BLAST programs, the default parameters of the respective programs (e.g., BLASTN; available at the Internet site for the National Center for Biotechnology Information) can be used. In one embodiment, the database searched is a non-redundant (NR) database, and parameters for sequence comparison can be set at: no filters; Expect value of 10; Word Size of 3; the Matrix is BLOSUM62; and Gap Costs have an Existence of 11 and an Extension of 1.

[0335] Another mathematical algorithm employed for the comparison of sequences is the algorithm of Myers and Miller, CABIOS (1989), the teachings of which are hereby incorporated by reference in its entirety. Such an algorithm is incorporated into the ALIGN program (version 2.0), which is part of the GCG (Accelrys, San Diego, Calif.) sequence alignment software package. When utilizing the ALIGN program for comparing amino acid sequences, a PAM120 weight residue table, a gap length penalty of 12, and a gap penalty of 4 is used. Additional algorithms for sequence analysis are known in the art and include ADVANCE and ADAM as described in Torellis and Robotti (Comput. Appl. Biosci., 10: 3-5 (1994), the teachings of which are hereby incorporated by reference in its entirety); and FASTA described in Pearson and Lipman (Proc. Natl. Acad. Sci. USA, 85: 2444-2448 (1988), the teachings of which are hereby incorporated by reference in its entirety).

[0336] The percent identity between two amino acid sequences can also be accomplished using the GAP program in the GCG software package (Accelrys, San Diego, Calif.) using either a Blossom 63 matrix or a PAM250 matrix, and a gap weight of 12, 10, 8, 6, or 4 and a length weight of 2, 3, or 4. In yet another embodiment, the percent identity between two nucleic acid sequences can be accomplished using the GAP program in the GCG software package (Accelrys, San Diego, Calif.), using a gap weight of 50 and a length weight of 3.

[0337] The nucleic acid sequence encoding a protein portion of HA, polypeptide or fusion proteins of the invention and polypeptides of the invention can include nucleic acid sequences that hybridize to nucleic acid sequences or complements of nucleic acid sequences of the invention, for example, SEQ ID NOS: 53-58, 64, 68, 71, 72, 73, 76, 78, 80, 84, 87, 104, 107, 110, 111, 112, 115, 116, 117, 119, 120, 121, 122, 123, 124, 125, 126, 127, 128, 129, 130, 131, 132, 133, 137, 139, 142, 143, 146, 147, 150, 167, 184, 185, 186, 187, 188, 189, 190, 191, and 192); and nucleic acid sequences that encode amino acid sequences and fusion proteins of the invention (e.g., SEQ ID NOS: 89-92, 95, 151-160, 177, 209, 210 and 211) under selective hybridization conditions (e.g., highly stringent hybridization conditions). As used herein, the terms “hybridizes under low stringency,” “hybridizes under medium stringency,” “hybridizes under high stringency,” or “hybridizes under very high stringency conditions,” describe conditions for hybridization and washing of the nucleic acid sequences. Guidance for performing hybridization reactions, which can include aqueous and nonaqueous methods, can be found in Aubusel, F. M., et al., Current Protocols in Molecular Biology, John Wiley & Sons, N.Y. (2001), the teachings of which are hereby incorporated herein in its entirety.

[0338] For applications that require high selectivity, relatively high stringency conditions to form hybrids can be employed. In solutions used for some membrane based hybridizations, addition of an organic solvent, such as formamide, allows the reaction to occur at a lower temperature. High stringency conditions are, for example, relatively low salt and/or high temperature conditions. High stringency are provided by about 0.02 M to about 0.10 M NaCl at temperatures of about 50° C. to about 70° C. High stringency conditions allow for limited numbers of mismatches between the two sequences. In order to achieve less stringent conditions, the salt concentration may be increased and/or the temperature may be decreased. Medium stringency conditions are achieved at a salt concentration of about 0.1 to 0.25 M NaCl and a temperature of about 37° C. to about 55° C., while low stringency conditions are achieved at a salt concentration of about 0.15 M to about 0.9 M NaCl, and a temperature ranging from about 20° C. to about 55° C. Selection of components and conditions for hybridization are well known to those skilled in the art and are reviewed in Ausubel et al. (1997, Short Protocols in Molecular Biology, John Wiley & Sons, New York N.Y., Units 2.8-2.11, 3.18-3.19 and 4-64.9).

[0339] A “subject,” as used herein, can be a mammal, such as a primate or rodent (e.g., rat, mouse). In a particular embodiment, the subject is a human.

[0340] An “effective amount,” when referring to the amount of a composition and fusion protein of the invention, refers to that amount or dose of the composition and fusion protein, that, when administered to the subject is an amount sufficient for therapeutic efficacy (e.g., an amount sufficient to stimulate an immune response in the subject). The compositions and fusion proteins of the invention can be administered in a single dose or in multiple doses.

[0341] The methods of the present invention can be accomplished by the administration of the compositions and fusion proteins of the invention by enteral or parenteral means. Specifically, the route of administration is by oral ingestion (e.g., drink, tablet, capsule form) or intramuscular injection of the composition and fusion protein. Other routes of administration as also encompassed by the present invention including intravenous, intradermal, intraarterial, intraperitoneal, or subcutaneous routes, and nasal administration. Suppositories or transdermal patches can also be employed.

[0342] The compositions and fusion proteins of the invention can be administered ex vivo to a subject's autologous dendritic cells. Following exposure of the dendritic cells to the composition and fusion protein of the invention, the dendritic cells can be administered to the subject.

[0343] The compositions and fusion proteins of the invention can be administered alone or can be coadministered to the patient. Coadministration is meant to include simultaneous or sequential administration of the composition, fusion protein or polypeptide of the invention individually or in combination. Where the composition and fusion protein are administered individually, the mode of administration can be conducted sufficiently close in time to each other (for example, administration of the composition close in time to administration of the fusion protein) so that the effects on stimulating an immune response in a subject are maximal. It is also envisioned that multiple routes of administration (e.g., intramuscular, oral, transdermal) can be used to administer the compositions and fusion proteins of the invention.

[0344] The compositions and fusion proteins of the invention can be administered alone or as admixtures with conventional excipients, for example, pharmaceutically, or physiologically, acceptable organic, or inorganic carrier substances suitable for enteral or parenteral application which do not deleteriously react with the extract. Suitable pharmaceutically acceptable carriers include water, salt solutions (such as Ringer's solution), alcohols, oils, gelatins and carbohydrates such as lactose, amylose or starch, fatty acid esters, hydroxymethycellulose, and polyvinyl pyrrolidine. Such preparations can be sterilized and, if desired, mixed with auxillary agents such as lubricants, preservatives, stabilizers, wetting agents, emulsifiers, salts for influencing osmotic pressure, buffers, coloring, and/or aromatic substances and the like which do not deleteriously react with the compositions, fusion proteins or polypeptides of the invention. The preparations can also be combined, when desired, with other active substances to reduce metabolic degradation. The compositions and fusion proteins of the invention can be administered by is oral administration, such as a drink, intramuscular or intraperitoneal injection or intranasal delivery. The compositions and fusion proteins alone, or when combined with an admixture, can be administered in a single or in more than one dose over a period of time to confer the desired effect (e.g., alleviate prevent viral infection, to alleviate symptoms of virus infection, such as influenza or flaviviral infection).

[0345] When parenteral application is needed or desired, particularly suitable admixtures for the compositions and fusion proteins are injectable, sterile solutions, preferably oily or aqueous solutions, as well as suspensions, emulsions, or implants, including suppositories. In particular, carriers for parenteral administration include aqueous solutions of dextrose, saline, pure water, ethanol, glycerol, propylene glycol, peanut oil, sesame oil, polyoxyethylene-block polymers, and the like. Ampules are convenient unit dosages. The compositions, fusion proteins or polypeptides can also be incorporated into liposomes or administered via transdermal pumps or patches. Pharmaceutical admixtures suitable for use in the present invention are well-known to those of skill in the art and are described, for example, in Pharmaceutical Sciences (17th Ed., Mack Pub. Co., Easton, Pa.) and WO 96/05309 the teachings of which are hereby incorporated by reference.

[0346] The compositions and fusion proteins of the invention can be administered to a subject on a support that presents the compositions, fusion proteins and polypeptides of the invention to the immune system of the subject to generate an immune response in the subject. The presentation of the compositions, fusion proteins and polypeptides of the invention would preferably include exposure of antigenic portions of the viral protein to generate antibodies. The components (e.g., PAMP and a viral protein) of the compositions, fusion proteins and polypeptides of the invention are in close physical proximity to one another on the support. The compositions and fusion proteins of the invention can be attached to the support by covalent or noncovalent attachment. Preferably, the support is biocompatible. “Biocompatible,” as used herein, means that the support does not generate an immune response in the subject (e.g., the production of antibodies). The support can be a biodegradable substrate carrier, such as a polymer bead or a liposome. The support can further include alum or other suitable adjuvants. The support can be a virus (e.g., adenovirus, poxvirus, alphavirus), bacteria (e.g., Salmonella) or a nucleic acid (e.g., plasmid DNA).

[0347] The dosage and frequency (single or multiple doses) administered to a subject can vary depending upon a variety of factors, including prior exposure to an antigen, a viral protein, the duration of viral infection, prior treatment of the viral infection, the route of administration of the composition, fusion protein or polypeptide; size, age, sex, health, body weight, body mass index, and diet of the subject; nature and extent of symptoms of viral exposure, viral infection and the particular viral responsible for the infection (e.g., a flavivirus, influenza virus), or treatment or infection of an other antigen, such as an influenza antigen, kind of concurrent treatment, complications from the viral exposure, viral infection or exposure or other health-related problems. Other therapeutic regimens or agents can be used in conjunction with the methods and compositions, fusion proteins or polypeptides of the present invention. For example, the administration of the compositions and fusion proteins can be accompanied by other viral therapeutics or use of agents to treat the symptoms of a condition associated with or consequent to exposure to the antigen, such as flavivirus infection (e.g., high fever, numbness, DHF, meningoencephalitis) or influenza infection, for example. Adjustment and manipulation of established dosages (e.g., frequency and duration) are well within the ability of those skilled in the art.

[0348] Influenza viruses are single-stranded RNA viruses that belong to the viral family Orthomyxoviridae. Influenza viruses are divided into three types (A, B, C) determined by the antigenic differences in ribonucleoprotein (RNP) and matrix (M) antigens of the viruses. Influenza A virus naturally infects humans and several other mammalian species, including swine and horses, and a wide variety of avian species, and causes epidemics and pandemics in the human population. Influenza B virus appears to naturally infect only humans and can cause epidemics in humans. Influenza C virus has been isolated from humans and swine, but generally does not occur in epidemics and usually results in mild disease in humans.

[0349] Mature influenza virions are enveloped with a pleomorphic structure ranging in diameter from 80 to 120 nm. The single-stranded RNA genome is closely associated with a helical nucleoprotein and is present in seven (influenza C) or eight (influenza A and B) separate segments of ribonucleoprotein (RNP), each of which has to be present for successful replication of the virus. The segmented genome is enclosed within an outer lipoprotein envelope. Matrix protein 1 (MP1 or also referred to herein as “M1”) lines the inside of the outer lipoprotein envelope and is bound to the RNP.

[0350] Hemagglutinin (HA) is a surface glycoprotein on a virus (e.g., an influenza virus) that is responsible for binding to N-AcetylNeuraminic Acid (NeuNAc; also referred to herein as “sialic acid”) on host cells and subsequent fusion of viral and host membranes. HA acquired its name by virtue of its ability to cause red blood cells to clump, or agglutinate. Influenza HA is a trimer consisting of the three monomeric (HA0) subunits. HA performs two critical functions during the infection process: binding to a cell surface sialyloligosaccharide receptor and fusion of virus and host cell membrane. Following binding of the HA trimer to the plasma membrane of a host cell, the host cell membrane engulfs the virus in an endosome and attempts to digest the contents of the endosome by acidifying its interior and transferring it to a lysosome in the host cell. However, the acidic environment of the lysosome destabilizes HA, resulting in partial unfolding of HA0 which exposes a protease-sensitive site (the maturaional cleaveage site) that is cleaved by a host protease to form HA1 and HA2 subunits which are connected by a single disulfide bond (Wiley, D. C., et al., Annu. Rev. Biochem. 56:365-394 (1987)). Cleavage occurs at a specific amino acid residue and generates a hydrophobic amino terminus for the HA2 subunit. This hydrophobic terminus of HA2 mediates fusion between the viral envelope and the endosomal membrane of the host cell and releases the contents of the virion into the cytoplasm of the cell, a process known as uncoating. Thus, cleavage of the HA polypeptide is a requirement for infectivity.

[0351] The crystal structure of several viral hemagglutinins has been determined (see, for example, Wilson, I. A., et al., Nature 289:366-373 (1981); Chen, J., et al., Cell 95:409-417 (1998); Ha, Y., et al., The EMBO Journal 21: 865-875 (2002); Russell, R. J., et al., Virology 325:287-296 (2004); and Cox, N. J., et al., In: Toply and Wilson's Microbiology and Microbial Infections, eds. B. W. J. Mathy, et al., Vol. 1 (9^{th} ed.) New York, N.Y., Oxford Univ. Press, Ch. 32, p. 634 (1998)). X-ray crystallographic structures show that HA is folded into two structural components or domains—a globular head and a fibrous stalk (see, for example, FIG. 1). The globular head includes HA1, including that part of HA1 that binds to sialic acid (also referred to as the “receptor binding site or domain” or “sialic acid binding site or domain”), and antiparallel β-sheets. The fibrous stalk is more proximal to the viral membrane and consists of all of HA2 and part of HA1, including the cleavage site between HA1 and HA2.

[0352] There are fifteen known subtypes of Influenza A HA (H1-H15) that share between about 40 to about 60% sequence identity (World Health Organization BULL. World Health Organ., 58:585-591 (1980)). Influenza viruses containing all 15 HA subtypes have been isolated from avian species (H5, H7, and H9), equine (H3 and H7), seals (H3, H4 and H7), whales (H1 and H13) and swine (H1, H3, and H9). Subtypes of influenza A virus are generally named according to the particular antigenic determinants of HA (H, 15 major types) and neuraminidase (N, about 9 major types). For example, subtypes include influenza A (H2N1), A(H3N2), A(H5N1), A(H7N2), A(H9N2), A(H1/H0), A(H3/H0) and A(H5/H0). In the last century, three subtypes of influenza A resulted in pandemics: H1 in 1918 and 1977; H2 in 1957 and H3 in 1968. In 1997, an H5 avian virus and in 1999, an H9 virus resulted in outbreaks of respiratory disease in Hong Kong. HA from influenza type B viruses have been isolated from humans and seals and are not divided into subtypes.

[0353] A host infected with influenza can mount an antibody response to the globular head of HA that protects that host from subsequent infection with the same strain of virus by blocking the interaction between HA and the host cell, i.e., neutralizing the infectivity of the virus. Due to the low fidelity and high rate of influenza RNA replication, the virus is constantly experiencing minor mutations in the HA gene that preserve the globular head structure and host cell interaction, but may allow progeny virus to escape immune surveillance. These point mutations are referred to as “antigenic drift.” In addition, if a single host is simultaneously infected with two different strains of influenza A, a new subtype of virus may emerge as a result of reassortment, or the exchange of the RNA segments, or genes, between different strains of influenza A viruses. The viruses emerging from reassortment present the human immune system with a new antigenic experience that usually results in high morbidity and mortality. This type of drastic antigenic change is known as “antigenic shift.” Since type B influenza viruses circulate almost exclusively in humans, these viruses cannot undergo reassortment with animal strains and, thus, are changed only by antigenic drift.

[0354] Immunity to HA can reduce the likelihood of infection and severity of disease if infection does occur. HA is an important antigenic target and the efficacy of vaccines depends on the antigenic match between the vaccine strain and the circulating strain. Since the hemagglutinin protein readily undergoes antigenic shift and drift in order to evade the host's immune defense, traditional vaccines must be based on currently circulating influenza strains and annually updated. Annual updates of influenza vaccines are not only costly they also require significant amounts of production time and manufacturing infrastructure. A vaccine composition based on invariant regions of the virus may provide broadly cross-reactive protection.

[0355] In contrast to the globular head of HA, changes in amino acid residues surrounding the maturational cleavage site of HA are limited due to functional constraints. Amino acid residues surrounding the HA maturational cleavage site influence recognition and therefore cleavability of the site by the host protease. Since the virus does not code for the protease, changes in the amino acid residues surrounding the maturational cleavage site are restricted. As a consequence a peptide of about 20 amino acids spanning the maturational cleavage site remains genetically stable across influenza viruses of the same HA subtype (WO 2004/080403; Bianchi, et al. J Virol 79:7380-7388 (2005)) or as branched peptides (Horvath, et al Immunol Letters 60:127-136 (1998), Nagy, et at Scand J Immunol 40:281-291 (1994)).

[0356] A second highly conserved antigen of influenza A is the ectodomain of the matrix 2 protein (M2e). M2 is a 97-amino acid protein expressed at low levels in mature virions and much higher levels on infected cells. The M2 protein forms a homotetramer that functions as an ion channel which is critical to the replication of the virus, thus, mutations in M2e are not as well tolerated as mutations in HA. The 24-amino acid ectodomain (M2e) is highly conserved across multiple influenza A strains. In mammals, M2e is poorly immunogenic in its native form. Antibodies to M2e can confer passive protection in animal models of influenza A infection (Treanor, J. J., et al., J Virol 64:1375 (1990); Liu, W. P., et al., Immunol Lett 93:131 (2004)), not by neutralizing the virus and preventing infectivity, but by killing infected cells and disrupting the viral life cycle (Zebedee, S. L., et al., J. Virol. 62:2762 (1998); Jegerlehner, A. N., et. al., J Immunol 172:5598 (2004)), which may be by antibody-dependent NK cell activity (Jegerlehner, A. N., et al., J Immunol 172:5598 (2004)). Composition that include M2e proteins may limit the severity of influenza A disease while allowing the host immune response to develop adaptive immunity to the dominant neutralizing influenza antigen, HA.

[0357] Strategies to manage infection and illness consequent to influenza viral infection have not changed significantly in the past four decades. Due to the seasonal nature of influenza disease, the distinct types of influenza virus (A and B) that threaten the human population, and the genetic instability of each type, it is necessary to reformulate a multivalent vaccine each year, based on epidemiological prediction of strains likely to be circulating in the human population in the upcoming flu season. The vaccine is produced from stocks of selected prototype viral strains grown in embryonated chicken eggs. Thus, the current strategy has several limitations that include: (a) dependence on uncertain prediction of circulating strains; (b) dependence on the ability to grow the appropriate strains in chicken eggs; (c) the egg-based production system carries risks of product contamination; (d) the product produced in eggs cannot be used in individuals with egg allergies; and (e) a significant risk that the typical multivalent vaccine will not confer protection against a pandemic strain of virus to which the human population has no pre-existing immunity.

[0358] The dominant protective component of the currently-available influenza vaccine is the viral hemagglutinin (HA). A more effective vaccine may include not only strain-specific HA, but cross-protective antigens, such as M2e and maturational cleavage site. A vaccine production process that is more reliable, economical, and scaleable than the current egg-based method is also preferable. The compositions, fusion proteins and polypeptides of the invention provide compositions that include HA, M2e, and maturational cleavage site of influenza proteins, which can stimulate an immune response, specifically, a protective immune response to several influenza antigens in subject.

[0359] The teachings of all patents, published applications and references cited herein are incorporated by reference in their entirety.

### EXEMPLIFICATION

### Example 1

### Design of Portions of a Naturally Occurring Hemagglutinin of Influenza A

### Materials and Methods

[0360] Design of the HA 1-1, 1-2 and 1-3 globular head constructs for A/Puerto Rico/8/34 (H1N1). Influenza strain A/Puerto Rico/8/34 (PR8) is a well-characterized mouse-adapted strain of influenza A virus. The published crystal structure of the mature PR8 HA (SEQ ID NO: 1) (Gamblin et al. 2005. Science 303:1838-1842; PDB accession number 1RU7) was used in combination with the Molecular Modeling Database to determine the boundaries for three PR8 globular head constructs. The complete list of solved crystal structures for influenza A hemagglutinin molecules can be found in the Protein Data Bank (PDB) or National Center for Biotechnology Information (NCBI) Structure website (http://www.ncbi.nlm.nih.gov/Structure).

[0361] The three dimensional crystal structure for the PR8 HA was viewed using the Cn3D program within the NCBI website. The trimeric HA molecule has the shape of a mushroom. The globular head refers to the portion of the hemagglutinin molecule at the top that resembles the mushroom head, and the coiled-coil stalk refers to the bottom part of the molecule that resembles the stalk of the mushroom (FIG. 1). The globular head contains the substrate binding site that binds to sialic acid on the cell surface, and therefore is important for viral entry. In addition, the majority of neutralizing antibodies epitopes are located near and around this receptor binding site, making the globular head a good target for protective vaccines. The globular head contains most of the HA1 peptide including residues numbered from E51 to K327 in PR8 for example.

[0362] The monomeric structure of PR8 chain A, which encompasses the globular head, was used to guide the design of the PR8 HA1-1, 1-2 and 1-3 constructs (FIG. 1). The HA constructs were designed with domain boundaries within the globular head so that when the molecule is expressed in a host cell, the encoded protein it may spontaneously fold or refolded in vitro to mimic the native conformation. A structural domain (also referred to herein as “domains”) within a protein is an element of overall structure that is self-stabilizing and often folds independently of the rest of the protein chain. Most domains can be classified into folds. Many domains are not unique to the proteins produced by one gene or one gene family but instead appear in a variety of proteins. Domains often are named and singled out because they play an important role in the biological function of the protein to which they belong; for example, the substrate binding domain of hemagglutinin can participate in binding to the substrate. Because domains can be self-stabilizing, domains can be swapped between one protein and another or associated to other carrier proteins by genetic engineering to make chimera proteins. A domain may be composed of none, one, or many structural motifs. In the cases of influenza hemagglutinin construct design, many structural motifs are preserved. The boundary selection is guided by known crystal structures. In the case of PR8, residues from E51 to K327 (SEQ ID NO: 1) fold into a compact structure that distinguishes from the rest of the HA molecules, thus is the region of focus to design HA constructs.

[0363] Design of the HA 1-1, 1-2 and 1-3 globular head constructs for A/Viet Nam/1203/2004 (H5N1). The HA structure used as a reference in the design of the Viet Nam/1203/2004 (H5N1) globular head constructs is described in Stevens et al, 2006, Science 312:404-410 (MMDB number 38730; PDB accession number 2FK0). As described for the PR8 globular head constructs above, the published crystal structure of the mature A/Viet Nam/1203/2004 HA (SEQ ID NO: 2) was used in combination with the Molecular Modeling Database to determine the domain boundaries for three Viet Nam globular head constructs. The same structural criteria for preservation of secondary and tertiary structure for the structural domain were applied to the design of the Viet Nam constructs. While different hemagglutinin molecules can differ in the nature or number of residues that comprise the hemagglutinin molecule; the overall structure is remarkably similar. Thus, design of the domain boundaries for the Viet Nam globular head constructs required placement of the boundaries at structurally equivalent but numerically different positions with in the HA molecule.

[0364] Design of the HA 1-1, 1-2 and 1-3 globular head constructs for A/Indonesia/5/2005 (H5N1). The crystal structure for the Indonesia HA has not been solved. In general, when the crystal structure for a given HA molecule has not been solved, the available structure with the highest sequence identity can be used to guide the construct design. In the case of the design of the Indonesia globular head construct, the closest structure available is the A/Viet Nam/1203/2004 (Stevens et al. 2006. Science 312:404-410; MMDB number 38730; PDB Accession number 2FK0), which is of the same subtype as A/Indonesia/5/2005.

[0365] To design globular head constructs for this HA, the primary sequence of the Indonesia HA (SEQ ID NO: 3) was first aligned with A/Viet Nam/1203/2004 HA (H5VN; SEQ ID NO: 2) molecule (primary sequence identity: 96.13%). The primary sequence alignment for A/Viet Nam/1203/2004 HA (H5VN; SEQ ID NO: 2) and A/Indonesian/5/2005 (H5IN; SEQ ID NO: 3) was conducted using CLUSTALW and is shown below, where (*) asterisk=identity, (:) colon=conservative substitution; (.) period=weakly conservative substitution; and (space)=divergent substitution.

| | | |
|---|---|---|
| | 50 | |
| H5IN | MEKIVLLLAIVSLVKSDQICIGYHANNSTEQVDTIMEKNVTVTHAQDILE | (SEQ ID NO: 3) |
| H5VN | MEKIVLLFAIVSLVKSDQICIGYHANNSTEQVDTIMEKNVTVTHAQDILE | (SEQ ID NO: 2) |
| | *******:****************************************** | |
| | 100 | |
| H5IN | KTHNGKLCDLDGVKPLILRDCSVAGWLLGNPMCDEFINVPEWSYIVEKAN | |
| H5VN | KKHNGKLCDLDGVKPLILRDCSVAGWLLGNPMCDEFINVPEWSYIVEKAN | |
| | *.************************************************ | |
| | 150 | |
| H5IN | PTNDLCYPGSFNDYEELKHLLSRINHFEKIQIIPKSSWSDHEASSGVSSA | |
| H5VN | PVNDLCYPGDFNDYEELKHLLSRINHFEKIQIIPKSSWSSHEASLGVSSA | |
| | *.*******.*****************************.**** ***** | |
| | 200 | |
| H5IN | CPYLGSPSFFRNVVWLIKKNSTYPTIKKSYNNTNQEDLLVLWGIHHPNDA | |
| H5VN | CPYQGKSSFFRNVVWLIKKNSTYPTIKRSYNNTNQEDLLVLWGIHHPNDA | |
| | *** *..********************:********************** | |
| | 250 | |
| H5IN | AEQTRLYQNPTTYISIGTSTLNQRLVPKIATRSKVNGQSGRMEFFWTILK | |
| H5VN | AEQTKLYQNPTTYISVGTSTLNQRLVPRIATRSKVNGQSGRMEFFWTILK | |
| | ****:**********:***********:********************** | |
| | 300 | |
| H5IN | PNDAINFESNGNFIAPEYAYKIVKKGDSAIMKSELEYGNCNTKCQTPMGA | |
| H5VN | PNDAINFESNGNFIAPEYAYKIVKKGDSTIMKSELEYGNCNTKCQTPMGA | |
| | ****************************:********************* | |
| | 350 | |
| H5IN | INSSMPFHNIHPLTIGECPKYVKSNRLVLATGLRNSPQRESRRKKRGLFG | |
| H5VN | INSSMPFHNIHPLTIGECPKYVKSNRLVLATGLRNSPQRERRRKKRGLFG | |
| | **************************************** ********* | |
| | 400 | |
| H5IN | AIAGFIEGGWQGMVDGWYGYHHSNEQGSGYAADKESTQKAIDGVTNKVNS | |
| H5VN | AIAGFIEGGWQGMVDGWYGYHHSNEQGSGYAADKESTQKAIDGVTNKVNS | |
| | ************************************************** | |
| | 450 | |
| H5IN | IIDKMNTQFEAVGREFNNLERRIENLNKKMEDGFLDVWTYNAELLVLMEN | |
| H5VN | IIDKMNTQFEAVGREFNNLERRIENLNKKMEDGFLDVWTYNAELLVLMEN | |
| | ************************************************** | |
| | 500 | |
| H5IN | ERTLDFHDSNVKNLYDKVRLQLRDNAKELGNGCFEFYHKCDNECMESIRN | |
| H5VN | ERTLDFHDSNVKNLYDKVRLQLRDNAKELGNGCFEFYHKCDNECMESVRN | |
| | ***********************************************:** | |
| | 550 | |
| H5IN | GTYNYPQYSEEARLKREEISGVKLESIGTYQILSIYSTVASSLALAIMMA | |
| H5VN | GTYDYPQYSEEARLKREEISGVKLESIGIYQILSIYSTVASSLALAIMVA | |
| | ***:************************ *******************:* | |
| | 568 | |
| H5IN | GLSLWMCSNGSLQCRICI | |
| H5VN | GLSLWMCSNGSLQCR--- | |
| | *************** | |

[0366] Design of the HA 1-1, 1-2 and 1-3 globular head constructs for A/New Calcdonia/20/1999 (H1N1). The crystal structure for the New Calcdonia HA has not been solved. To design the globular head constructs for this HA, the primary sequence of the New Calcdonia HA (H1NC; SEQ ID NO: 4) was first aligned with two closely related HA molecules of the same subtype (primary sequence homology >85%) for which the structures have been resolved, specifically the H1N1 1918 virus (same as A/South Carolina/1/18) (SEQ ID NO: 5) and the A/Puerto Rico/8/34 virus (H1PR8; SEQ ID NO: 1) (Gamblin, et al., Science 303, 1838-42 (2004). A/South Carolina/1/18: MMDB number 26943, PDB accession number: 1RUZ and PR8, MMDB number: 26941 and PDB accession number: 1RU7). The primary sequence alignment was conducted using CLUSTALW and is shown below, where (*) asterisk=identity, (:) colon=conservative substitution; (.) period=weakly conservative substitution; and (space)=divergent substitution.

| | | |
|---|---|---|
| | 50 | |
| H1NC | MKAKLLVLLCTFTATYADTICIGYHANNSTDTVDTVLEKNVTVTHSVNLL | (SEQ ID NO: 4) |
| H1PR8 | MKANLLVLLSALAAADADTICIGYHANNSTDTVDTVLEKNVTVTHSVNLL | (SEQ ID NO: 1) |
| | ***:*****.:::*: ********************************** | |
| | 100 | |
| H1NC | EDSHNGKLCLLKGIAPLQLGNCSVAGWILGNPECELLISKESWSYIVETP | |
| H1PR8 | EDSHNGKLCRLKGIAPLQLGKCNIAGWLLGNPECDPLLPVRSWSYIVETP | |
| | ********* **********:*.:***:******: *:. .********* | |
| | 150 | |
| H1NC | NPENGTCYPGYFADYEELREQLSSVSSFERFEIFPKESSWPNHTVTGVSA | |
| H1PR8 | NSENGICYPGDFIDYEELREQLSSVSSFERFEIFPKESSWPNHNTNGVTA | |
| | *.*** **** * ******************************...**:* | |
| | 200 | |
| H1NC | SCSHNGKSSFYRNLLWLTGKNGLYPNLSKSYVNNKEKEVLVLWGVHHPPN | |
| H1PR8 | ACSHEGKSSFYRNLLWLTEKEGSYPKLKNSYVNKKGKEVLVLWGIHHPPN | |
| | :***:************* *:* **:*.:****:* ********:***** | |
| | 250 | |
| H1NC | IGNQRALYHTENAYVSVVSSHYSRRFTPEIAKRPKVRDQEGRINYYWTLL | |
| H1PR8 | SKEQQNIYQNENAYVSVVTSNYNRRFTPEIAERPKVRDQAGRMNYYWTLL | |
| | :*: :*:.********:*:*.********:******* **:******* | |
| | 300 | |
| H1NC | EPGDTIIFEANGNLIAPWYAFALSRGFGSGIITSNAPMDECDAKCQTPQG | |
| H1PR8 | KPGDTIIFEANGNLIAPMYAFALSRGFGSGIITSNASMHECNTKCQTPLG | |
| | :**************** ******************.*.**::***** * | |
| | 350 | |
| H1NC | AINSSLPFQNVHPVTIGECPKYVRSAKLRMVTGLRNIPSIQSRGLFGAIA | |
| H1PR8 | AINSSLPYQNIHPVTIGECPKYVRSAKLRMVTGLRNTPSIQSRGLFGAIA | |
| | *******:**:************************* ************* | |
| | 400 | |
| H1NC | GFIEGGWTGMVDGWYGYHHQNEQGSGYAADQKSTQNAINGITNKVNSVIE | |
| H1PR8 | GFIEGGWTGMIDGWYGYHHQNEQGSGYAADQKSTQNAINGITNKVNTVIE | |
| | **********:***********************************:*** | |
| | 450 | |
| H1NC | KMNTQFTAVGKEFNKLERRMENLNKKVDDGFLDIWTYNAELLVLLENERT | |
| H1PR8 | KMNIQFTAVGKEFNKLEKRMENLNKKVDDGFLDIWTYNAELLVLLENERT | |
| | *** *************:******************************** | |
| | 500 | |
| H1NC | LDFHDSNVKNLYEKVKSQLKNNAKEIGNGC-------------------- | |
| H1PR8 | LDFHDSNVKNLYEKVKSQLKNNAKEIGNGCFEFYHKCDNECMESVRNGTY | |
| | ****************************** | |
| | 550 | |
| H1NC | -------------------------------------------------- | |
| H1PR8 | DYPKYSEESKLNREKVDGVKLESMGIYQILAIYSTVASSLVLLVSLGAIS | |
| | 565 | |
| H1NC | --------------- | |
| H1PR8 | FWMCSNGSLQCRICI | |

[0367] Design of the HA 1-1, 1-2 and 1-3 globular head constructs for A/Wisconsin/67/2005 (H3N2). The crystal structure for the Wisconsin HA has not been solved. To design the globular head constructs for this HA, the primary sequence of the Wisconsin HA (H3W is; SEQ ID NO: 6) was first aligned with a closely related reference HA molecule of the same subtype (primary sequence identity: 81.16%) for which the structure had been resolved, specifically influenza A/X31 subtype H3N2 (H3×31; SEQ ID NO: 7) (PDB accession number: 1VIU). The Wisconsin HA sequence was aligned with the X31 HA using CLUSTAL W and is shown below, where (*) asterisk=identity, (:) colon=conservative substitution; (.) period=weakly conservative substitution; and (space)=divergent substitution. Each amino acid in X31 was found to have a corresponding match in A/Wisconsin/67/2005 sequence. The domain boundaries the X31 structure were then used to identify the domain boundaries in the A/Wisconsin/67/2005.

| | | |
|---|---|---|
| | 50 | |
| H3Wis | QKLPGNDNSTATLCLGHHAVPNGTIVKTITNDQIEVTNATELVQSSSTGG | (SEQ ID NO: 6) |
| H3X31 | QDLPGNDNSTATLCLGHHAVPNGTLVKTITDDQIEVTNATELVQSSSTGK | (SEQ ID NO: 7) |
| | *.**********************:*****:****************** | |
| | 100 | |
| H3Wis | ICDSPHQILDGENCTLIDALLGDPQCDGFQNKKWDLFVERSKAYSNCYPY | |
| H3X31 | ICNNPHRILDGIDCTLIDALLGDPHCDVFQNETWDLFVERSKAFSNCYPY | |
| | **:.**:**** :***********:** ***:.**********:****** | |
| | 150 | |
| H3Wis | DVPDYASLRSLVASSGTLEFNDESFNWTGVTQNGTSSACKRRSNNSFFSR | |
| H3X31 | DVPDYASLRSLVASSGTLEFITEGFTWTGVIQNGGSNACKRGPGSGFFSR | |
| | ******************** *.*.**** *** *.**** ....**** | |
| | 200 | |
| H3Wis | LNWLTHLKFKYPALNVTMPNNEKFDKLYIWGVHHPGTDNDQIFLHAQASG | |
| H3X31 | LNWLTKSGSTYPVLNVTMPNNDNFDKLYIWGIHHPSTNQEQTSLYVQASG | |
| | *****: .**.********::********:***.*:::* *:.**** | |
| | 250 | |
| H3Wis | RITVSTKRSQQTVIPNIGSRPRIRNIPSRISIYWTIVKPGDILLINSTGN | |
| H3X31 | RVTVSTRRSQQTIIPNIGSRPWVRGLSSRISIYWTIVKPGDVLVINSNGN | |
| | *:****:*****:******** :*.:.**************:*:***.** | |
| | 300 | |
| H3Wis | LIAPRGYFKIRSGKSSIMRSDAPIGKCNSECITPNGSIPNDKPFQNVNRI | |
| H3X31 | LIAPRGYFKMRTGKSSIMRSDAPIDTCISECITPNGSIPNDKPFQNVNKI | |
| | *********:*:************..* ********************:* | |
| | 329 | |
| H3Wis | TYGACPRYVKQNTLKLATGMRNVPEKQTR | |
| H3X31 | TYGACPKYVKQNTLKLATGMRNVPEKQT- | |
| | ******:********************* | |

### Results

[0368] Depiction of domain boundaries for PR8 HA constructs. The selected boundary domains are highlighted in the sequence below (SEQ ID NO: 1) as follows: HA1-1 boundaries are single-underlined (S53-R324 of SEQ ID NO: 1); HA1-2 boundaries are double-underlined (K62-5284 of SEQ ID NO: 1); HA1-3 boundaries are bold-underlined (N101-G276 of SEQ ID NO: 1). Detailed descriptions of each subunit design and boundary domains are given below.

| (SEQ ID NO: 1) | |
|---|---|
| MKANLLVLLSALAAADADTICIGYHANNSTDTVDTVLEKNVTVTHSVNLLEDSHNGKLCR | 60 |
| LKGIAPLQLGKCNIAGWLLGNPECDPLLPVRSWSYIVETP [symbol] CYPGDFIDYEELRE | 120 |
| QLSSVSSFERFEIFPKESSWPNHNTNGVTAACSHEGKSSFYRNLLWLTEKEGSYPKLKNS | 180 |
| YVNKKGKEVLVLWGIHHPPNSKEQQNLYQNENAYVSVVTSNYNRRFTPEIAERPKVRDQA | 240 |
| GRMNYYWTLLKPGDTIIFEANGNLIAPMYA [symbol] FGSGIITSNASMHECNTKCQTPLG | 300 |
| AINSSLPYQNIHPVTIGECPKYVRSAKLRMVTGLRNIPSIQSRGLFGAIAGFIEGGWTGM | 360 |
| IDGWYGYHHQNEQGSGYAADQKSTQNAINGITNKVNTVIEKMNIQFTAVGKEFNKLEKRM | 420 |
| ENLNKKVDDGFLDIWTYNAELLVLLENERTLDFHDSNVKNLYEKVKSQLKNNAKEIGNGC | 480 |
| FEFYHKCDNECMESVRNGTYDYPKYSEESKLNREKVDGVKLESMGIYQILAIYSTVASSL | 540 |
| VLLVSLGAISFWMCSNGSLQCRICI | 565 |

[0369] PR/8 HA1-1 construct (SEQ ID NO: 8). For this construct, four (4) conserved disulfide bonds were preserved by making the amino-terminal truncation before the Cysteine at position 59 of SEQ ID NO: 1 and the carboxyl-terminal truncation after the Cysteine at position 319 of SEQ ID NO: 1. The preserved disulfide bonds are listed as the following: C59-C291; C72-C84; C107-C152 and C295-C319 of SEQ ID NO: 1. Using the crystal structure cited above and the Molecular Modeling Database (MMDB) to identify tertiary and secondary structure, the amino terminal truncation was placed at the Serine at position 53 of SEQ ID NO: 1, which is immediately adjacent to the coil turn formed by residues 50-52 of SEQ ID NO: 1 (LED). The truncation completely eliminated the preceding β-strand formed by residues 44-49 of SEQ ID NO: 1 [THSVNL (SEQ ID NO: 214)]. The strand spanning residues 53-58 of SEQ ID NO: 1 [SHNGKL (SEQ ID NO: 215)] and the entire β-strand associated with residues 59-62 of SEQ ID NO: 1 [CRLK (SEQ ID NO: 216)] were preserved. Although in the structure residues 53-58 of SEQ ID NO: 1 [SHNGKL (SEQ ID NO: 215)] are defined as a random coil, these residues mimic a β-strand and thus serve to further stabilize the β-pleated sheets defined by residues 307-310 of SEQ ID NO: 1 [PYQN, SEQ ID NO: 217] and residues 320-323 of SEQ ID NO: 1 [PKYV, SEQ ID NO: 218]. The carboxyl-terminal truncation was made in the random coil sequence spanning residues 324-327 of SEQ ID NO: 1 [RSAK, SEQ ID NO: 219] at the Arginine at position 324 of SEQ ID NO: 1 such that the carboxyl-terminal tail which interacts with HA2 was completely eliminated.

[0370] PR/8 HA1-2 construct (SEQ ID NO: 9). For this construct two (2) conserved disulfide bonds (C72-C84 and C107-C152 of SEQ ID NO: 1) were preserved by making the amino-terminal truncation before the Cysteine at position 72 of SEQ ID NO: 1 and the carboxyl-terminal truncation after the Cysteine at position 152 of SEQ ID NO: 1. Using the crystal structure cited above and the MMD database to identify tertiary and secondary structure, the amino-terminal and the carboxyl-terminal truncations were placed in the loops [KGI, residues 62-64 of SEQ ID NO: 1 and NASMHE (SEQ ID NO: 220), residues 285-290, of SEQ ID NO: 1] that connect two distinct sets of β-pleated sheets. Truncation of the molecule within these loops preserves the surrounding secondary structure which in turn preserves the tertiary structure of the globular head.

[0371] The amino-terminal truncation was made at the Lysine at position 62 of SEQ ID NO: 1, such that the β-strand comprising APLQLG (SEQ ID NO: 221) at residues 65-70 of SEQ ID NO: 1 of the membrane-distal set of β-strands remained wholly intact, while the preceding β-strand [CRLK, SEQ ID NO: 216, residues 59-62 of SEQ ID NO: 1] that is more membrane-proximal was largely eliminated. The carboxyl-terminal truncation was made at the Serine at position 284 of SEQ ID NO: 1 such that the β-strand [GIITS, SEQ ID NO: 222, residues 280-284 of SEQ ID NO: 1] of the distal set of β-strands remains wholly or largely intact and the subsequent β-strand [CNTK, SEQ ID NO: 223, residues 291-294 of SEQ ID NO: 1] of the proximal set of β-stands is wholly or largely eliminated. Preservation of the distal set of β-strands was the main determinant in selecting the domain boundaries for the HA1-2 construct. The distal β-pleated sheet, which is comprised of β-strands of APLQLG (SEQ ID NO: 221) [residues 65-70 of SEQ ID NO: 1], SYIVET (SEQ ID NO: 224) [residues 94-99 of SEQ ID NO: 1], and GIITS (SEQ ID NO: 222) [residues 280-284 of SEQ ID NO: 1], serves as the stabilizing secondary structural element that ensures a compact domain structure.

[0372] PR/8 HA1-3 construct (SEQ ID NO: 10). For this construct one (1) conserved disulfide bond (C107-C152 of SEQ ID NO: 1) was preserved by making the amino-terminal truncation before the Cysteine at position 107 of SEQ ID NO: 1 and the carboxyl terminal truncation after the Cysteine at position 152 of SEQ ID NO: 1. Using the crystal structure cited above and the MMDB database to identify tertiary and secondary structure the amino-terminal truncation was made at the Asparagine at position 101 of SEQ ID NO: 1 such that the preceding α-helix [NIAGWLLG, SEQ ID NO: 225, residues 73-80 of SEQ ID NO: 1] and β-strand [SYIVET, SEQ ID NO: 224, residues 94-99 of SEQ ID NO: 1] were completely eliminated while the subsequent β-stand [PGDFI, SEQ ID NO: 226, residues 109-113 of SEQ ID NO: 1] was preserved along with the strand NSENGICY, SEQ ID NO: 227 [residues 101-108 of SEQ ID NO: 1] that includes the conserved Cysteine at position 107 of SEQ ID NO: 1.

[0373] The carboxyl-terminal truncation was made near the end of the β-strand [AFALSRGF, SEQ ID NO: 228, residues 270-277 of SEQ ID NO: 1]. The last amino acid of this strand, position 277 of SEQ ID NO: 1, is a Phenylalanine, which was eliminated so as not to expose this hydrophobic residue. The carboxyl-terminal truncation was made at the Glycine at position 276 of SEQ ID NO: 1 which is in between two secondary structures. Truncation at this position keeps the preceding β-strand [AFALSRG, SEQ ID NO: 229, residues 270-276 of SEQ ID NO: 1] largely intact and completely eliminates the subsequent β-strand [GIITS, SEQ ID NO: 222, residues 280-284 of SEQ ID NO: 1].

[0374] Depiction of domain boundaries for VN04 HA construct. The selected boundary domains are highlighted in the sequence below (SEQ ID NO: 2) as follows: HA1-1 boundaries are single-underlined (E50-K323 of SEQ ID NO: 2); HA1-2 boundaries are double-underlined (G62-E284 of SEQ ID NO: 2); HA1-3 boundaries are bold-underlined (N103-G276 of SEQ ID NO: 2). Detailed descriptions of each subunit design and boundary domains are given below.

| (SEQ ID NO: 2) | |
|---|---|
| MEKIVLLFAIVSLVKSDQICIGYHANNSTEQVDTIMEKNVTVTHAQDILEKKHNGKLCDL | 60 |
| DGVKPLILRDCSVAGWLLGNPMCDEFINVPEWSYIVEKANPV [symbol] GDFNDYEELKHL | 120 |
| LSRINHFEKIQIIPKSSWSSHEASLGVSSACPYQGKSSFFRNVVWLIKKNSTYPTIKRSY | 180 |
| NNTNQEDLLVLWGIHHPNDAAEQTKLYQNPTTYISVGTSTLNQRLVPRIATRSKVNGQSG | 240 |
| RMEFFWTILKPNDAINFESNGNFIAPEYAY [symbol] DSTIMKSELEYGNCNTKCQTPMGA | 300 |
| INSSMPFHNIHPLTIGECPKYVKSNRLVLATGLRNSPQRERRRKKRGLFGAIAGFIEGGW | 360 |
| QGMVDGWYGYHHSNEQGSGYAADKESTQKAIDGVTNKVNSIIDKMNTQFEAVGREFNNLE | 420 |
| RRIENLNKKMEDGFLDVWTYNAELLVLMENERTLDFHDSNVKNLYDKVRLQLRDNAKELG | 480 |
| NGCFEFYHKCDNECMESVRNGTYDYPQYSEEARLKREEISGVKLESIGIYQILSIYSTVA | 540 |
| SSLALAIMVAGLSLWMCSNGSLQCR | 565 |

[0375] VN04 HA1-1 construct (SEQ ID NO: 11). For this construct four (4) conserved disulfide bonds were preserved by making the amino terminal truncation before the Cysteine at position 58 of SEQ ID NO: 2 and the carboxyl-terminal truncation after the Cysteine at position 318 of SEQ ID NO: 2. The preserved disulfide bonds are listed as the following: C58-C290; C71-C83; C106-C151 and C294-C318 of SEQ ID NO: 2. Using the crystal structure cited above and the Molecular Modeling Database (MMDB) to identify tertiary and secondary structure, the amino terminal truncation was placed at the Glutamic Acid found at position 50 of SEQ ID NO: 2 such that the preceding β-strand [THAQDI, SEQ ID NO: 230, residues 43-48 of SEQ ID NO: 2] is totally eliminated and the subsequent strand [EKKHNG, SEQ ID NO: 231, residues 50-55 of SEQ ID NO: 2] and the β-strand [KLCDLD, SEQ ID NO: 232] formed by residues 56-61 of SEQ ID NO: 2 were left wholly intact. Structurally the random peptide comprising residues 50-55 of SEQ ID NO: 2 [EKKHNG, SEQ ID NO: 231] mimics a β-strand that completes the membrane-distal β-pleated sheet to keep the domain structure intact. The carboxyl-terminal truncation was made in the loop region near residues 323-326 of SEQ ID NO: 2 [KSNR, SEQ ID NO: 233] that follow the Cysteine at position 318 of SEQ ID NO: 2. Truncation within this loop preserves secondary structure in that the preceding β-strand formed by residues 319-322 of SEQ ID NO: 2 [PKYV, SEQ ID NO: 234] remains wholly intact and the subsequent β-strand [LVLATG, SEQ ID NO: 235, residues 327-332 of SEQ ID NO: 2] is completely eliminated.

[0376] VN04 HA1-2 construct (SEQ ID NO: 12). For this construct two (2) conserved disulfide bonds (C71-C83 and C106-C151 of SEQ ID NO: 2) were preserved by making the amino-terminal truncation before the Cysteine at position 71 of SEQ ID NO: 2 and the carboxyl-terminal truncation after the Cysteine at position 151 of SEQ ID NO: 2. Using the crystal structure cited above and the Molecular Modeling Database (MMDB) to identify tertiary and secondary structure, the amino terminal truncation was placed at the glycine at position 62 of SEQ ID NO: 2 such that the subsequent β-strand comprising residues 64-68 of SEQ ID NO: 2 [KPLIL, SEQ ID NO: 236] remains wholly intact, while the preceding β-strand [KLCDLD, SEQ ID NO: 232, residues 56-61 of SEQ ID NO: 2] is completely eliminated.

[0377] To preserve secondary structure, the carboxyl-terminal truncation was made in the loop region at the Glutamic Acid at position 284 of SEQ ID NO: 2 such that the preceding β-strand [TIMKS, SEQ ID NO: 237, residues 279-283 of SEQ ID NO: 2] remained wholly or largely intact and the subsequent β-strand [YGNCN, SEQ ID NO: 238, residues 287-291 of SEQ ID NO: 2] was completely eliminated.

[0378] VN04 HA1-3 construct (SEQ ID NO: 13). For this construct one (1) conserved disulfide bond (C106-C151 of SEQ ID NO: 2) was preserved by making the amino-terminal truncation before the Cysteine at position 106 of SEQ ID NO: 2 and the carboxyl terminal truncation after the Cysteine at position 151 of SEQ ID NO: 2.

[0379] Using the crystal structure cited above and the Molecular Modeling Database (MMDB) to identify tertiary and secondary structure, the amino terminal truncation was placed at the Asparagine at position 103 of SEQ ID NO: 2 such that the preceding β-strand [SYIVEK, SEQ ID NO: 239, residues 93-98 of SEQ ID NO: 2] was completely eliminated while the subsequent β-strand sequence [PGDFN, SEQ ID NO: 240, residues 108-112 of SEQ ID NO: 2] remained wholly or largely intact. To preserve secondary structure, the carboxyl-terminal truncation was made in the random coil region at the Glycine at position 276 of SEQ ID NO: 2 such that the preceding β-strand formed by residues 102-105 of SEQ ID NO: 2 [KGDS, SEQ ID NO: 241] remains wholly or partially intact, the preceding β-strand [EYAYKIVK, SEQ ID NO: 242, residues 267-274 of SEQ ID NO: 2] is wholly preserved and the subsequent β-strand [TIMKS, SEQ ID NO: 237, residues 279-283 of SEQ ID NO: 2] is completely eliminated.

[0380] Depiction of domain boundaries for IND05 HA constructs. The A/Indonesia/5/2005 construct description is based on sequence alignment in reference to A/Viet Nam/1203/2004 structure. The selected boundary domains are highlighted in the sequence below (SEQ ID NO: 3) as follows: HA1-1 boundaries are single-underlined (E50-K323, of SEQ ID NO: 3); HA1-2 boundaries are double-underlined (G62-E284 of SEQ ID NO: 3); HA1-3 boundaries are bold-underlined (N103-G276 of SEQ ID NO: 3). Detailed descriptions of each subunit design and boundary domains are given below.

| (SEQ ID NO: 3) | |
|---|---|
| MEKIVLLLAIVSLVKSDQICIGYHANNSTEQVDTIMEKNVTVTHAQDILEKTHNGKLCDL | 60 |
| DGVKPLILRDCSVAGWLLGNPMCDEFINVPEWSYIVEKANPT [symbol] GSFNDYEELKHL | 120 |
| LSRINHFEKIQIIPKSSWSDHEASSGVSSACPYLGSPSFFRNVVWLIKKNSTYPTIKKSY | 180 |
| NNTNQEDLLVLWGIHHPNDAAEQTRLYQNPTTYISIGTSTLNQRLVPKIATRSKVNGQSG | 240 |
| RMEFFWTILKPNDAINFESNGNFIAPEYAY [symbol] DSAIMKSELEYGNCNTKCQTPMGA | 300 |
| INSSMPFHNIHPLTIGECPKYVKSNRLVLATGLRNSPQRESRRKKRGLFGAIAGFIEGGW | 360 |
| QGMVDGWYGYHHSNEQGSGYAADKESTQKAIDGVTNKVNSIIDKMNTQFEAVGREFNNLE | 420 |
| RRIENLNKKMEDGFLDVWTYNAELLVLMENERTLDFHDSNVKNLYDKVRLQLRDNAKELG | 480 |
| NGCFEFYHKCDNECMESIRNGTYNYPQYSEEARLKREEISGVKLESIGTYQILSIYSTVA | 540 |
| SSLALAIMMAGLSLWMCSNGSLQCRICI | 560 |

[0381] IND05 HA1-1 construct (SEQ ID NO: 14). For this construct four (4) conserved disulfide bonds were preserved by making the amino-terminal truncation before the Cysteine at position 58 of SEQ ID NO: 3 and the carboxyl-terminal truncation after the Cysteine at position 318 of SEQ ID NO: 3. The preserved disulfide bonds are listed as the following: C58-C291; C71-C83; C106-C151 and C294-C318 of SEQ ID NO: 3. Using the crystal structure cited above and the Molecular Modeling Database (MMDB) to identify tertiary and secondary structure, the amino terminal truncation was placed at the Glutamic Acid found at position 50 of SEQ ID NO: 3 such that the preceding β-strand [THAQDI, SEQ ID NO: 243, residues 43-48 of SEQ ID NO: 3] was totally eliminated and the subsequent strand [EKTHNG, SEQ ID NO: 244, residues 50-55 of SEQ ID NO: 3] and β-strand [KLCDLD, SEQ ID NO: 245] formed by residues 56-61 of SEQ ID NO: 3 was left wholly intact. Structurally the random peptide comprising residues 50-55 of SEQ ID NO: 3 [EKTHNG, SEQ ID NO: 244] mimics a β-strand that completes the membrane-distal β-pleated sheet to keep the domain structure intact. The carboxyl-terminal truncation was made in the loop region near residues 323-326 of SEQ ID NO: 3 [KSNR, SEQ ID NO: 246] that follow the Cysteine at position 318 of SEQ ID NO: 3. Truncation within this loop preserves secondary structure in that the preceding β-strand formed by residues 319-322 of SEQ ID NO: 3 [PKYV, SEQ ID NO: 247] remains wholly intact and the subsequent β-strand [LVLATG, SEQ ID NO: 248, residues 327-332 of SEQ ID NO: 3] is completely eliminated.

[0382] IND05 HA1-2 construct (SEQ ID NO: 15). For this construct two (2) conserved disulfide bonds (C71-C83 and C106-C151 of SEQ ID NO: 3 were preserved by making the amino-terminal truncation before the Cysteine at position 71 of SEQ ID NO: 3 and the carboxyl-terminal truncation after the Cysteine at position 151 of SEQ ID NO: 3. Using the crystal structure cited above and the Molecular Modeling Database (MMDB) to identify tertiary and secondary structure, the amino terminal truncation was placed at the Glycine at position 62 of SEQ ID NO: 3 such that the subsequent β-strand comprising residues 64-68 of SEQ ID NO: 3 [KPLIL, SEQ ID NO: 249] remained wholly intact, while the preceding β-strand [KLCDLD, SEQ ID NO: 245, residues 56-61 of SEQ ID NO: 3] was completely eliminated. To preserve secondary structure, the carboxyl terminal truncation was made in the loop region at the Glutamic Acid at position 284 of SEQ ID NO: 3 in the sequence [ELE, residues 284-286 of SEQ ID NO: 3] such that the preceding β-strand [AIMKS, SEQ ID NO: 250, residues 279-283 of SEQ ID NO: 3] remained wholly or largely intact and the subsequent β-strand [YGNCN, SEQ ID NO: 251, residues 287-291 of SEQ ID NO: 3] was completely eliminated.

[0383] IND05 HA1-3 construct (SEQ ID NO: 16). For this construct one (1) conserved disulfide bond (C106-C151 of SEQ ID NO: 3 was preserved by making the amino-terminal truncation before the Cysteine at position 106 of SEQ ID NO: 3 and the carboxyl-terminal truncation after the Cysteine at position 151 of SEQ ID NO: 3. Using the crystal structure cited above and the Molecular Modeling Database (MMDB) to identify tertiary and secondary structure, the amino terminal truncation was placed at the asparagine at position 103 of SEQ ID NO: 3 such that the preceding β-strand [SYIVEK, SEQ ID NO: 252, residues 93-98 of SEQ ID NO: 3] was completely eliminated while the β-strand sequence [PGSFN, SEQ ID NO: 253, residues 108-112 of SEQ ID NO: 3] remained wholly or largely intact. To preserve secondary structure, the carboxyl-terminal truncation was made in the random coil region at the Glycine found at position 276 of SEQ ID NO: 3 such that the preceding β-strand [EYAYKIVK, SEQ ID NO: 254, residues 267-274 of SEQ ID NO: 3] was wholly preserved and the subsequent β-strand [AIMKS, SEQ ID NO: 250, residues 279-283 of SEQ ID NO: 3] was completely eliminated.

[0384] Depiction of domain boundaries for New Calcdonia HA constructs. A/New Calcdonia/20/199 construct description is based on sequence alignment in reference of A/Puerto Rico/8/34 structure. The selected boundary domains are highlighted in the sequence below (SEQ ID NO: 4) as follows: HA1-1 boundaries are single-underlined (S53-R324 of SEQ ID NO: 4); HA1-2 boundaries are double-underlined (K62-5284 of SEQ ID NO: 4); HA1-3 boundaries are bold-underlined (N101-G276 of SEQ ID NO: 4). Detailed descriptions of each subunit design and boundary domains are given below.

| (SEQ ID NO: 4) | |
|---|---|
| MKAKLLVLLCTFTATYADTICIGYHANNSTDTVDTVLEKNVTVTHSVNLLEDSHNGKLCL | 60 |
| LKGIAPLQLGNCSVAGWILGNPECELLISKESWSYIVETP [symbol] CYPGYFADYEELRE | 120 |
| QLSSVSSFERFEIFPKESSWPNHTVTGVSASCSHNGKSSFYRNLLWLTGKNGLYPNLSKS | 180 |
| YVNNKEKEVLVLWGVHHPPNIGNQRALYHTENAYVSVVSSHYSRRFTPEIAKRPKVRDQE | 240 |
| GRINYYWTLLEPGDTIIFEANGNLIAPWYA [symbol] FGSGIITSNAPMDECDAKCQTPQG | 300 |
| AINSSLPFQNVHPVTIGECPKYVRSAKLRMVTGLRNIPSIQSRGLFGAIAGFIEGGWTGM | 360 |
| VDGWYGYHHQNEQGSGYAADQKSTQNAINGITNKVNSVIEKMNTQFTAVGKEFNKLERRM | 420 |
| ENLNKKVDDGFLDIWTYNAELLVLLENERTLDFHDSNVKNLYEKVKSQLKNNAKEIGNGC | 480 |
| FEFYHKCNNECMESVKNGTYDYPKYSEESKLNREKIDGVKLESMGVYQILAIYSTVASSL | 540 |
| VLLVSLGAISFWMCSNGSLQCRICI | 565 |

[0385] New Calcdonia HA1-1 construct design (SEQ ID NO: 17). For this construct, four (4) conserved disulfide bonds were preserved by making the amino terminal truncation before the Cysteine at position 59 of SEQ ID NO: 4 and the carboxyl-terminal truncation after the Cysteine at position 319 of SEQ ID NO: 4. The preserved disulfide bonds are listed as the following: C59-C291; C72-C84; C107-C152 and C295-C319 of SEQ ID NO: 4. Using the reference crystal structures and the MMDB to check secondary structures the amino terminal truncation was made at the Serine at position 53 of SEQ ID NO: 4 such that the preceding β-strand [THSVNLLED, SEQ ID NO: 255, residues 44-52 of SEQ ID NO: 4] was totally eliminated and the subsequent β-strands SHNGKL, SEQ ID NO: 256 [residues 53-58 of SEQ ID NO: 4] and APLQLG, SEQ ID NO: 257 [residues 65-70, of SEQ ID NO: 4] were left wholly intact. The amino-terminal truncation in the random coil sequence [SHNGKL, SEQ ID NO: 256, residues 53-58 of SEQ ID NO: 4] left the secondary structure largely intact because it mimics a β-strand that leaves the β-pleated sheet intact. The carboxyl-terminal truncation was made at the Arginine at position 324 of SEQ ID NO: 4 in the random coil sequence [RSAK, SEQ ID NO: 258, residues 324-327 of SEQ ID NO: 4] following the Cysteine at position 319 of SEQ ID NO: 4. The truncation in this random coil preserves secondary structure by leaving the preceding β-strand [PKYV, SEQ ID NO: 259, residues 320-323 of SEQ ID NO: 4] wholly intact while the subsequent β-strand [LRMVTG, SEQ ID NO: 260, residues 328-333 of SEQ ID NO: 4] is completely eliminated.

[0386] New Calcdonia HA1-2 construct design (SEQ ID NO: 18). For this construct two (2) conserved disulfide bonds (C72-C84 and C107-C152 of SEQ ID NO: 4) were preserved by making the amino-terminal truncation before the Cysteine at position 72 of SEQ ID NO: 4 and the carboxyl-terminal truncation after the Cysteine at position 152 of SEQ ID NO: 4. Using the reference crystal structures and the MMDB to check secondary structures the amino-terminal truncation was made at the Lysine at position 62 of SEQ ID NO: 4 such that the random coil sequence comprising [SHNGKLCLLKGI, SEQ ID NO: 261, residues 53-64 of SEQ ID NO: 4] was partially or largely removed, the preceding β-strand [THSVNLLED, SEQ ID NO: 255, residues 44-52 of SEQ ID NO: 4] was completely eliminated and the subsequent β-strand [APLQLG, SEQ ID NO: 257, residues 65-70 of SEQ ID NO: 4] remained wholly intact. The carboxyl-terminal truncation was made at the Serine at position 284 of SEQ ID NO: 4 such that the preceding β-strand [SGIITS, SEQ ID NO: 262, residues 279-284 of SEQ ID NO: 4] remained wholly intact and the subsequent random coil [NAPMDECDA, SEQ ID NO: 263, residues 285-293 of SEQ ID NO: 4] was wholly or largely eliminated.

[0387] New Calcdonia HA1-3 construct design (SEQ ID NO: 19). For this construct one (1) conserved disulfide bond (C107-C152 of SEQ ID NO: 4 was preserved by making the amino-terminal truncation before the Cysteine at position 107 of SEQ ID NO: 4 and the carboxyl terminal truncation after C152 of SEQ ID NO: 4. Using the reference crystal structures and the MMDB to check secondary structures the amino-terminal truncation was made at the Asparagine at position 101 of SEQ ID NO: 4 such that the receding β-strand [SYIVET, SEQ ID NO: 264, residues 94-99 of SEQ ID NO: 4] was completely eliminated and the subsequent β-strand [PGYFA, SEQ ID NO: 265, residues 109-113 of SEQ ID NO: 4] remained wholly intact. To preserve the secondary structure the carboxyl-terminal truncation was made at the Glycine at position 276 of SEQ ID NO: 4 such that the β-strand sequence [YAFALSRGF, SEQ ID NO: 266, residues 269-277 of SEQ ID NO: 4] remained largely intact, while the subsequent β-strand sequence [SGIITS, SEQ ID NO: 262, residues 279-284 of SEQ ID NO: 4] was eliminated.

[0388] Depiction of domain boundaries for A/Wisconsin/67/2005 HA constructs. A/Wisconsin/67/2005 construct description is based on sequence alignment in reference of A/X31 structure. The selected boundary domains are highlighted in the sequence below (SEQ ID NO: 6) as follows: HA1-1 boundaries are single-underlined (Q44-K310 of SEQ ID NO: 6); HA1-2 boundaries are double-underlined (S54-D271 of SEQ ID NO: 6); HA1-3 boundaries are bold-underlined (S95-G263 of SEQ ID NO: 6). Detailed descriptions of each subunit design and boundary domains are given below.

| (SEQ ID NO: 6) | |
|---|---|
| QKLPGNDNSTATLCLGHHAVPNGTIVKTITNDQIEVTNATELVQSSSTGGICDSPHQILD | 60 |
| GENCTLIDALLGDPQCDGFQNKKWDLFVERSKAY [symbol] DVPDYASLRSLVASSGTLEF | 120 |
| NDESFNWTGVTQNGTSSACKRRSNNSFFSRLNWLTHLKFKYPALNVTMPNNEKFDKLYIW | 180 |
| GVHHPGTDNDQIFLHAQASGRITVSTKRSQQTVIPNIGSRPRIRNIPSRISIYWTIVKPG | 240 |
| DILLINSTGNLIAPRGY [symbol] KSSIMRSDAPIGKCNSECITPNGSIPNDKPFQNVNRI | 300 |
| TYGACPRYVKQNTLKLATGMRNVPEKQTR | 329 |

[0389] A/Wisconsin/67/2005 HA1-1 construct design (SEQ ID NO: 20). For this construct, four (4) conserved disulfide bonds were preserved by making the amino terminal truncation before the Cysteine at position 52 of SEQ ID NO: 6 and the carboxyl-terminal truncation after the Cysteine at position 305 of SEQ ID NO: 6. The preserved disulfide bonds are listed as the following: C52-C277; C64-C76; C97-C139 and C281-C305 of SEQ ID NO: 6. Using the reference crystal structures and the MMDB to check secondary structures the amino terminal truncation was made at the Glutamine at position 44 of SEQ ID NO: 6, right after the tight turn formed by residues 42 and 43 of SEQ ID NO: 6 [LV], such that the preceding β-strand [TNATE, SEQ ID NO: 267, residues 37-41 of SEQ ID NO: 6] was totally eliminated while the entire short β-strand formed by residues QSS [44-46 of SEQ ID NO: 6] was preserved. The carboxyl-terminal truncation was made in the random coil sequence [PRYVK, SEQ ID NO: 268, residues 306-310 of SEQ ID NO: 6] following the Cysteine at position 305 of SEQ ID NO: 6 such that the carboxyl-terminal tail which interacts with HA2 was completely eliminated. Although the carboxyl-terminal sequence [PRYVK, SEQ ID NO:268, residues 306-310 of SEQ ID NO: 6)] is defined as a random coil, structurally it serves as an additional β-strand that further stabilizes the β-pleated sheets defined by residues 44-46 of SEQ ID NO: 6 [QSS] and residues 293-297 of SEQ ID NO: 6 [PFQNV, SEQ ID NO: 269]. This set of β-pleated encompasses the amino-terminus and carboxy-terminus within one stable secondary structure element to ensure a compact domain structure.

[0390] A/Wisconsin/67/2005 HA1-2 construct design (SEQ ID NO: 21). For this construct two (2) conserved disulfide bonds (C64-C76 and C97-C139 of SEQ ID NO: 6) were preserved by making the amino-terminal truncation before the Cysteine at position 64 of SEQ ID NO: 6 and the carboxyl-terminal truncation after the Cysteine at position 139 of SEQ ID NO: 6. Using the reference crystal structures and the MMDB to check secondary structures the amino-terminal truncation was made in the loops that connect two distinct sets of β-pleated sheets. The amino-terminal truncation was made at the Serine at position 54 of SEQ ID NO: 6, such that the β-strand comprising residues 57-62 of SEQ ID NO: 6 [QILDGE, SEQ ID NO: 270] of the membrane-distal set of β-strands remained wholly intact, while the membrane-proximal β-strand [GGICD, SEQ ID NO: 271, residues 49-53 of SEQ ID NO: 6] was completely eliminated. The carboxyl-terminal truncation was made at the Aspartic Acid at position 271 of SEQ ID NO: 6. Truncation at this position preserved secondary structure such that the membrane-distal β-strand [SSIMRS, SEQ ID NO: 272, residues 265-270 of SEQ ID NO: 6] remained intact while the membrane-proximal β-strand [APIGK, SEQ ID NO: 273, residues 272-276 of SEQ ID NO: 6] was eliminated. The membrane-distal β-pleated sheets comprising β-strands QILDGE (SEQ ID NO: 270), [residues 57-62 of SEQ ID NO: 6] LFVER (SEQ ID NO: 274) [residues 86-90 of SEQ ID NO: 6], and SSIMRS, (SEQ ID. NO: 272), [residues 265-270 of SEQ ID NO: 6] serve as the stabilizing secondary structure element that ensures a compact domain structure.

[0391] A/Wisconsin/67/2005 HA1-3 construct design (SEQ ID NO: 22). For this construct one (1) conserved disulfide bond (C97-C139 of SEQ ID NO: 6) was preserved by making the amino-terminal truncation before the Cysteine at position 97 of SEQ ID NO: 6 and the carboxy-terminal truncation after the Cysteine at position 139 of SEQ ID NO: 6. Using the reference crystal structure and the MMDB to check secondary structures the amino-terminal truncation was made at the Serine at position 95 of SEQ ID NO: 6 such that the preceding α-helix [TLIDALLG, SEQ ID NO: 275, residues 65-72 of SEQ ID NO: 6] was completely eliminated while the Serine at position 95 of SEQ ID NO: 6 and Asparagine at position 96 of SEQ ID NO: 6 were preserved along with the conserved Cysteine at position 97 of SEQ ID NO: 6. The carboxyl-terminal truncation was made in the random coil sequence at about the Glycine at position 263 of SEQ ID NO: 6 such that the random coil sequence containing residues 261-263 of SEQ ID NO: 6 [RSG] was kept wholly or partially intact, while the preceding β-strand [RGYFKI, SEQ ID NO: 276, residues 255-260 of SEQ ID NO: 6] was wholly preserved and the subsequent β-strand [SSIMRS, SEQ ID NO: 272, residues 265-270 of SEQ ID NO: 6] was completely eliminated.

### Discussion

[0392] Parts of the globular head domain of the influenza virus hemagglutinin (HA) protein may generate neutralizing antibodies (Brand and Skehel, 1972; Eckert, 1973; Jackson et al., 1979; Russ et al., 1981) and the discrete, globular structure of this domain was thought to constitute a protein fragment which could be expressed in bacteria and refolded, or expressed and secreted from a eukaryotic host, thereby avoiding the expression and purification problems which have been encountered producing the full-length HA protein.

[0393] The largest HA construct (also referred to herein as “HA fragment”) fused to STF2, HA1-1 (SEQ ID NO: 8, 11, 14, 17, 20), encompasses most of or likely the entire globular region of the naturally occurring (wild type) HA1 head domain. A naturally occurring fragment of HA1 very similar to the HA1-1 construct is released from the virus on limited proteolysis (Bizeband et al., 1995). Thus, structural analysis and experimental data suggest that the HA1-1 construct should fold efficiently, whether produced in bacteria or eukaryotes, and maintain a stable native-like structure. Similarly, it is expected that the entire HA0s, the external portion of HA molecule outside the viral membrane (SEQ ID NO: 23) consisting of HA1 and HA2 but excluding the signal peptide (17 aa), internal peptide within the viral membrane (12 aa) and transmembrane domain (24 aa) should attain its native conformation when expressed in a eukaryotic host or can be refolded into a native state in vitro when expressed in bacteria. The two smaller HA fragments (HA1-2 (SEQ ID NO: 9, 12, 15, 18, 21) and HA1-3 (SEQ ID NO: 10, 13, 16, 19, 22)) truncate the region of the head domain distal to the receptor binding site in a manner which may either destabilize the resulting protein fragment (HA1-3) or expose the side chains of a few large hydrophobic residues (HA1-2). For this reason, experimental mutations were introduced into the HA1-2 and HA1-3 constructs, denoted as HA1-2mut (SEQ ID NO: 24, 26, 28, 30, 32) and HA1-3mut (SEQ ID NO: 25, 27, 29, 31, 33). The substitutions made in the HA1-3mut (SEQ ID NO: 25, 27, 29, 31, 33) construct introduce oppositely charged residues on the opposite strands which are left exposed by the HA1-3 truncations. “HA mut,” as used herein, means an amino acid in the native or naturally occurring HA has been substituted with an amino acid that does not occur in the native or naturally occurring HA. Substituted residues may form a salt bridge and stabilize a structure which may otherwise fold poorly, or not at all. For example, in PR8, G105 was replaced by glutamate and Y115 was substituted with lysine (SEQ ID NO: 25). Negatively charged glutamate interacted with positively charged lysine residue so that N-terminal peptide 1-8 of SEQ ID NO: 25 [NSENEICY, SEQ ID NO: 277] was stabilized by charge-charge interaction with Lysine 15 located at the N-terminus of the short helix 15-22 of SEQ ID NO: 25 [KEELREQL, SEQ ID NO: 278] in the center of the molecule. For the HA1-2 construct, the truncations can lead to the exposure of hydrophobic side chains which would not be expected to impair expression of the protein. However, the exposed residues may lead to aggregation of expressed protein or instability of expressed protein. To avoid aggregation and enhance the stability of the expressed molecule the few large hypdrophobic residues that become exposed were substituted with more neutral amino acids to generate HA1-2mut (SEQ ID NO: 24, 26, 28, 30, 32). These substitutions may result in a protein which is more amenable to a robust manufacturing process and/or long term stability.

### Example 2

### Design of Portions of a Naturally Occurring Hemagglutinin of Influenza B

### Materials and Methods

[0394] Design of the HA1-1, 1-2 and 1-3 globular head constructs for B/Lee/40. Structural considerations in the design of an influenza B HA vaccine are similar to those for influenza A, i.e., the domain boundary of the globular head of HA must be identified so that the flagellin-HA fusion protein can fold correctly or be refolded correctly to expose appropriate antigenic epitopes. Unlike influenza A, well-defined X-ray crystallographic structures are not available for influenza B HA, thus it is more difficult to unambiguously define the domain boundary of globular head. Therefore the influenza B HA model must be predicted based on bioinformatic and structural models (Tung et al. 2004. J. Gen. Virl. 85, 3249-3259). These investigators used a “knowledge-based” approach which depends on a high degree of sequence homology between the known structure from the protein data bank and the target unknown structure. In general, this approach benefits most from at least 35% sequence identity between the known and target proteins.

[0395] In the case of influenza B, the closest models come from A/Swine/Hong Kong/9/98 (SEQ ID NO: 34) (24% identity, PDB accession code 1JSD) and A/Aichi/2/68 (SEQ ID NO: 35) (21% identity, PDB accession code 1HGF). Although the sequence identities between the target model B/Lee/40 HA (SEQ ID NO: 36) and known template models are substantially below the desired minimum of 35%, the close similarity of the functions and tertiary folds of influenza A HA proteins in spite of their sequence divergence (H1, H3, H5 and H9 share only 18% sequence identity) suggest a possibly successful prediction of influenza B HA structure using the influenza A HA model. Moreover, influenza C HEF (Hemagglutinin-Esterase-Fusion) protein folds similarly to influenza A HA structure despite even lower sequence identity than any of the A/B comparison.

[0396] Since the crystal structure of influenza C HEF is known (PDB accession number 1FLC, MMDB accession number 12663), Tung et al included the knowledge of the structure similarity between C HEF and the known influenza A HA proteins to predict influenza B HA structure. Tung et al first aligned the HEF sequence from C/Johannesburg/1/66 (SEQ ID NO: 37) with one sequence from each of the 15 HA subtypes of influenza A virus (http://flu.lanl.gov) using CLUSTALW (Thompson et al. 1994. Nucleic Acids Res 22, 4673-4680) and compiled a profile based on structure-informed alignment.

[0397] The conserved secondary structural features were captured and assigned, as well as the variations among the types and subtypes by year and host species. They then further aligned the augmented A/C profile to an alignment of influenza B HA sequences, including B/Lee/40. The homology modeling techniques of Tung (1999) was used to construct B/Lee/40 model.

[0398] Briefly, they first matched the main-chain structures of the target to those of the template in the aligned regions. Insertions in the target relative to the template were treated as loops with known end-structure. Stretching the predicted structure accommodated insertions in the template relative to the target. The mainchain structures of the loops were modeled by using an efficient Monte Carlo loop-sampling method (Tung, 1997; Ryu et al., 1998). Once the main-chain structure was modeled, the side-chain atoms were attached. As the head of the HA molecule is compact, limited space is available to place the side-chain atoms. Hence, in the analysis, side-chain torsional angles were initialized to equal or be close to those in the template structure. This consideration is particularly useful in avoiding clashes between side chains in the modeled structure. Finally, the all-atom models were subjected to a short run of energy minimization (1000 cycles) by using AMBER (Weiner et al., 1986) to relieve unfavourable steric interactions and to optimize the stereochemistry. The quality of the target model was checked by PROCHECK (Wilson et al. 1998. J. Mol. Biol. 276, 417-436) and the functionality was checked by substrate docking to test whether the model substrate binding site can accommodate the natural receptor analogue sialyllactose as we have seen in the crystal structure of the HA of A/Aichi/2/68 (Weis et al. 1988. Nature 333, 426-431). The simulated B/Lee/40 model appears reasonable in a Ramachandran Plot (Wilson et al. 1998. J. Mol. Biol. 276, 417-436) and shows no steric crash when docking the sialyl-2-3-lactose molecule into the substrate binding site of the B/Lee/40 model, indicating a correct stereochemistry. Therefore the B/Lee/40 model was used to guide the design of influenza B HA subunit vaccines.

### Results and Discussion

[0399] Depiction of Domain Boundaries for B/Lee/40 HA constructs. The selected boundary domains are highlighted in the sequence below as follows: HA1-1 boundaries are single-underlined (T48-K340 of SEQ ID: 36), and HA1-2 boundaries are double-underlined (K60-G299 of SEQ ID: 36). Detailed descriptions of each subunit design and boundary domains are given below.

| (SEQ. ID NO: 36) | |
|---|---|
| MKAIIVLLMVVTSNADRICTGITSSNSPHVVKTATQGEVNVTGVIPLTTTPTKSHFANLK | 60 |
| GTQTRGKLCPNCFNCTDLDVALGRPKCMGNTPSAKVSILHEVKPATSGCFPIMHDRTKIR | 120 |
| QLPNLLRGYENIRLSTSNVINTETAPGGPYKVGTSGSCPNVANGNGFFNTMAWVIPKDNN | 180 |
| KTAINPVTVEVPYICSEGEDQITVWGFHSDDKTQMERLYGDSNPQKFTSSANGVTTHYVS | 240 |
| QIGGFPNQTEDEGLKQSGRIVVDYMVQKPGKTGTIVYQRGILLPQKVWCASGRSKVIKGS | 300 |
| LPLIGEADCLHEKYGGLNKSKPYYTGEHAKAIGNCPIWVKTPLKLANGTKYRPPAKLLKE | 360 |
| RGFFGAIAGFLEGGWEGMIAGWHGYTSHGAHGVAVAADLKSTQEAINKITKNLNYLSELE | 420 |
| VKNLQRLSGAMNELHDEILELDEKVDDLRADTISSQIELAVLLSNEGIINSEDEHLLALE | 480 |
| RKLKKMLGPSAVEIGNGCFETKHKCNQTCLDRIAAGTFNAGDFSLPTFDSLNITAASLND | 540 |
| DGLDNHTILLYYSTAASSLAVTLMIAIFIVYMVSRDNVSCSICL | 584 |

[0400] The coordinates of the simulated B/Lee/40 model are available in Protein Data Bank with the accession code 1TX1. The pdb file was converted to the MMDB (Molecular Modeling Data Base) format by using VAST (Vector Alignment Search Tool) search (http://www.ncbi.nlm.nih.gov/StructureNAST/vastsearch.html). The model of 1TX1 structure then was viewed by Cn3D and the structure was saved in MMDB format. Based on the same principal used to design influenza A HA1-1 and HA1-2 constructs, the domain boundaries of B/Lee/40 HA-1 and HA 1-2 were pinpointed by examining the model structure. B/Lee/40 HA1-1 (SEQ ID NO: 38) includes the epitope-concentrated globular top, the membrane distal β-sheet and an additional β-sandwich located underneath the membrane distal β-sheet. The amino terminus of HA1-1 starts from residue 48 and ends at residue 340 (TTTPTK (SEQ ID NO: 279) . . .-. . . CPIWVK (SEQ ID NO: 280)) of SEQ ID NO: 36). The B/Lee/40 HA1-2 (SEQ ID NO: 39) was designed by removing the β-sandwich from HA1-1. HA1-2 starts from residue 60 and ends at residue 299 (KGTQTR (SEQ ID NO: 281) . . .-. . . SKVIKG (SEQ ID NO: 282)) of SEQ ID NO: 36. In order to confirm the boundary selection, other independent methods were also employed. The first method used was the primary sequence alignment. The sequence of A/Aichi/2/68 (SEQ ID NO: 35) was aligned with B/Lee/40 (SEQ ID NO: 36) sequence. The boundaries of A/Aichi/2/68 HA1-1 (SEQ ID NO: 40) (residues 60-326 QSSSTG (SEQ ID NO: 283) . . .-. . . CPKYVK (SEQ ID NO: 284)) and HA1-2 (SEQ ID NO: 41) (residues 72-287; HRILDG (SEQ ID NO: 285) . . .-. . . SIMRSD (SEQ ID NO: 286)) were aligned closely to those of B/Lee/40, supporting the boundary selections using simulated model. One residue adjustment was made to avoid exposing hydrophobic residues and either end of the construct. Thus, the 3-dimensional structure prediction matches very well with primary sequence alignment.

[0401] The second method used was the secondary structure prediction. The domain boundary is usually located in the loop or turn region without invading much of the secondary structure elements such as the α-helix and the β-sheet, especially the center of the α-helix bundle or the β-sheet. This criterion was used to double check if the boundary selection made form simulated 3-D structure is in agreement with independent secondary structure prediction. The program PHD (http://ca.expasy.org/tools→Proteomics and sequence analysis tools→Secondary and tertiary structure tools→PredictProtein) was used to perform the secondary structure prediction. Other than two of the HA1-2 carboxy-terminal residues overlapping with a short α-helix (5 amino acids), all other boundary residues fall in the loop regions, indicating a reasonable boundary selection. PHD results is listed as the following, where AA is the amino acid sequence; OBS_sec is the observed secondary structure: H=helix, E=extended sheet, blank=other (loop); PROF_sec: PROF predicted secondary structure: E=extended (sheet), blank=other (loop), PROF=PROF: Profile network prediction HeiDelberg; Rel_sec: reliability index for PROFsec prediction (0=low to 9=high)

[0402] For the brief presentation strong predictions marked by SUB see: subset of the PROFsec prediction, for all residues with an expected average accuracy >82% NOTE: for this subset the following symbols are used: L: is loop (for which above ‘ ’ is used).: means that no prediction is made for this residue, as the reliability is: Rel<5; O_{—}3_acc: observed relative solvent accessibility (ace) in 3 states: b=0-9%, i=9-36%, e=36-100%; P_{—}3_acc: PROF predicted relative solvent accessibility (acc) in 3 states: b=0-9%, i=9-36%, e=36-100%; Re_acc: reliability index for PROFace prediction (0=low to 9=high).

[0403] For the brief presentation strong predictions marked by ‘*’; SUB_acc: subset of the PROFacc prediction, for all residues with an expected average correlation >0.69 (tables in header).

[0404] NOTE: for this subset the Wowing symbols are used:
[0405] I: is intermediate (for which above ‘ ’ is used)
[0406] .: means that no prediction is made for this residue, as the reliability is:
[0407] Rel<4.

| | |
|---|---|
| | ....,....1....,....2....,....3....,....4....,....5 |
| AA | MKAIIVLLMVVTSNADRICTGITSSNSPHVVKTATQGEVNVTGVIPLTTT |
| OBS_sec | |
| PROF_sec | EEEEEEEEEE EEEEEEEE EEEEEE EEEEEEEEEE |
| Rel_sec | 90456542111257762677454037753444441276147765653203 |
| SUB_sec | L..EEE......LLLL.EEE.E...LLL........LL..EEEEEE.... |
| O_3_acc | bbbbbbbbbbbbbbbbbbbbbbbbbbbbbbbbbbbbbbbbbbbbbbbbbb |
| P_3_acc | ee bbbbbbbbbeeb bbbbbbb eeee b bb eeebeb b bbe |
| Rel_acc | 33169997521111032778921201222233322135234021321012 |
| SUB_acc | ...bbbbbb........bbbb................e..b......... |
| | ....,....6....,....7....,....8....,....9....,....10 |
| AA | PTKSHFANLKGTQTRGKLCPNCFNCTDLDVALGRPKCMGNTPSAKVSILH |
| OBS_sec | |
| PROF_sec | EEEE EEEEEE EEEE |
| Rel_sec | 67752200245344675222033211232342043234337875203787 |
| SUB_sec | LLLL......L...LLL.......................LLLL...EEE |
| O_3_acc | bbbbbbbbbbbbbbbbbbbbbbbbbbbbbbbbbbbbbbbbbbbbbbbbbb |
| P_3_acc | eee bbe eeeeeee eb bbbbbbbbb b b ee eeeeb bbb |
| Rel_acc | 23201011020002300210201031223343310100210221541265 |
| SUB_acc | ..............................b.............eb..bb |
| | ....,....11.1.,....12.1.,....13.1.,....14.1.,....15.1 |
| AA | EVKPATSGCFPIMHDRTKIRQLPNLLRGYENIRLSTSNVINTETAPGGPY |
| OBS_sec | |
| PROF_sec | EE HHHHHHHHHH EEEEE EE |
| Rel_sec | 50566441224778858887664221002304663021003444556531 |
| SUB_sec | E.LLL......LLLLHHHHHHH..........EE..........LLLL.. |
| O_3_acc | bbbbbbbbbbbbbbbbbbbbbbbbbbbbbbbbbbbbbbbbbbbbbbbbbb |
| P_3_acc | b eee bbbbb e b ebbebbee eeb eeeeee |
| Rel_acc | 12210110221001337264350314531332301200011120132011 |
| SUB_acc | ................e.bi.b...be....................... |
| | ....,....16.1.,....17.1.,....18.1.,....19.1.,....20.1 |
| AA | KVGTSGSCPNVANGNGFFNTMAWVIPKDNNKTAINPVTVEVPYICSEGED |
| OBS_sec | |
| PROF_sec | HHHHHHHHHHH EEEEEE |
| Rel_sec | 24431001255662036787888752378864236641012244157874 |
| SUB_sec | .........LLLL...HHHHHHHHH..LLLL...LL.........LLLL. |
| O_3_acc | bbbbbbbbbbbbbbbbbbbbbbbbbbbbbbbbbbbbbbbbbbbbbbbbbb |
| P_3_acc | bbbbbbee ee bbbbbbb bbeeeee ee ebeb b b eee |
| Rel_acc | 11111012110301026314921522122321112112322203203212 |
| SUB_acc | ................b..bb..b.......................... |
| | ....,....21.1.,....22.1.,....23.1.,....24.1.,....25.1 |
| AA | QITVWGFHSDDKTQMERLYGDSNPQKFTSSANGVTTHYVSQIGGFPNQTE |
| OBS_sec | |
| PROF_sec | EEEEEEEE HHHHHH EEEEE EEEEEEEE |
| Rel_sec | 47897532588742544320368853775200122343201275331035 |
| SUB_sec | .EEEEE..LLLL..H......LLLL.EEE.............LL.....L |
| O_3_acc | bbbbbbbbbbbbbbbbbbbbbbbbbbbbbbbbbbbbbbbbbbbbbbbbbb |
| P_3_acc | bbbbbbbbb eeee b eeeeeeb b b e e e ebee b e |
| Rel_acc | 19696993033223122210203213224011122211311001202001 |
| SUB_acc | .bbbbbb.....................b..................... |
| | ....,....26.1.,....27.1.,....28.1.,....29.1.,....30.1 |
| AA | DEGLKQSGRIVVDYMVQKPGKTGTIVYQRGILLPQKVWCASGRSKVIKGS |
| OBS_sec | |
| PROF_sec | EEEEEEEEE EEEEEE EEE EEEEE EEEE |
| Rel_sec | 56754320377888983577247886434023022235520330245401 |
| SUB_sec | LLLL.....EEEEEEE.LLL..EEEE...........EE.......E... |
| O_3_acc | bbbbbbbbbbbbbbbbbbbbbbbbbbbbbbbbbbbbbbbbbbbbbbbbbb |
| P_3_acc | eee bbbbbbb bbbb ee b b bbbbbb bb b eeb bbe e |
| Rel_acc | 17211105270744553301222473010244520230221020211103 |
| SUB_acc | .e.....b.b.bibbb.......ib.....bbb................. |
| | ....,....31.1.,....32.1.,....33.1.,....34.1.,....35.1 |
| AA | LPLIGEADCLHEKYGGLNKSKPYYTGEHAKAIGNCPIWVKTPLKLANGTK |
| OBS_sec | |
| PROF_sec | HHH HHHHH HHHHH |
| Rel_sec | 32233333000113432246764334340342334133220003551573 |
| SUB_sec | ...................LLL......................HH.LL. |
| O_3_acc | bbbbbbbbbbbbbbbbbbbbbbbbbbbbbbbbbbbbbbbbbbbbbbbbbb |
| P_3_acc | e e e bb ee b bbbebbe be bb bbbbb |
| Rel_acc | 10010011112110110111101210102102111021712452461321 |
| SUB_acc | .......................................b..bb.bb.... |
| | ....,....36.1.,....37.1.,....38.1.,....39.1.,....40.1 |
| AA | YRPPAKLLKERGFFGAIAGFLEGGWEGMIAGWHGYTSHGAHGVAVAADLK |
| OBS_sec | |
| PROF_sec | EEEEHHHH EEEEE H |
| Rel_sec | 56853211324203110113404531100120021023564325530623 |
| SUB_sec | LLLL...................L..............LL...EE..L.. |
| O_3_acc | bbbbbbbbbbbbbbbbbbbbbbbbbbbbbbbbbbbbbbbbbbbbbbbbbb |
| P_3_acc | b eee be bbbbbbbbbbbbbb bbbbbbbbbbbbbb bbbbbbb e |
| Rel_acc | 00011411202355999999623520456353043010011315264032 |
| SUB_acc | .....e......bbbbbbbbb..b..bbb.b..b.........b.bb... |
| | ....,....41.1.,....42.1.,....43.1.,....44.1.,....45.1 |
| AA | STQEAINKITKNLNYLSELEVKNLQRLSGAMNELHDEILELDEKVDDLRA |
| OBS_sec | |
| PROF_sec | HHHHHHHHHHHHHHHHHHHHHHHHHHHHHHHHHHHHHHHHHHHHHH HHH |
| Rel_sec | 47888989873212477733101234446677898888878756210111 |
| SUB_sec | .HHHHHHHHH.....HHH..........HHHHHHHHHHHHHHHH...... |
| O_3_acc | bbbbbbbbbbbbbbbbbbbbbbbbbbbbbbbbbbbbbbbbbbbbbbbbbb |
| P_3_acc | bbbebbeebbe b bbee beebeeb ebbeebbe beeb eebee |
| Rel_acc | 28049825725342322312063124534063444467553254223101 |
| SUB_acc | .b.ebb.eb.e.b........e...eb.e.b.ebbeibee..ee...... |
| | ....,....46.1.,....47.1.,....48.1.,....49.1.,....50.1 |
| AA | DTISSQIELAVLLSNEGIINSEDEHLLALERKLKKMLGPSAVEIGNGCFE |
| OBS_sec | |
| PROF_sec | HHHHHHHHHHHHHH HHHHHHHHHHHHHHHHHHHH EEE |
| Rel_sec | 03645477777753464114550578879888887664424540663252 |
| SUB_sec | ..H.H.HHHHHHH..L....LL.HHHHHHHHHHHHHH....H..LL..E. |
| O_3_acc | bbbbbbbbbbbbbbbbbbbbbbbbbbbbbbbbbbbbbbbbbbbbbbbbbb |
| P_3_acc | bbbb bb bbbbb eebb e e b eb e b e b e bee eebbbb |
| Rel_acc | 04450592968651122001021323439443944173428232012340 |
| SUB_acc | .bbb.bb.bbbbb.............i.bie.bie.b.e.b.......b. |
| | ....,....51.1.,....52.1.,....53.1.,....54.1.,....55.1 |
| AA | TKHKCNQTCLDRIAAGTFNAGDFSLPTFDSLNITAASLNDDGLDNHTILL (SEQ ID NO: 36) |
| OBS_sec | |
| PROF_sec | EEEE HHHHHHHH HHHH EEEEEEEEE EEEEE |
| Rel_sec | 22003402344311355466523223103101002476217776303665 |
| SUB_sec | ...............LL.LLL...............EE..LLLL...EEE |
| O_3_acc | bbbbbbbbbbbbbbbbbbbbbbbbbbbbbbbbbbbbbbbbbbbbbbbbbb |
| P_3_acc | b beb e bbbbb bbbb ee eebbe beb bbeb eeeeeeb bbb |
| Rel_acc | 42120312620271012211330320211224131235303222133868 |
| SUB_acc | b.......b...b..................e.....b.........bbb |
| | ....,....56.1.,....57.1.,....58.1. (SEQ ID NO: 36) |
| AA | YYSTAASSLAVTLMIAIFIVYMVSRDNVSCSICL |
| OBS_sec | |
| PROF_sec | EEEHHHHHHHHHHHHHHHHHHH EEEEEEE |
| Rel_sec | 4310021478888888776321006740346860 |
| SUB_sec | ........HHHHHHHHHHH.....LL....EEE. |
| O_3_acc | bbbbbbbbbbbbbbbbbbbbbbbbbbbbbbbbbb |
| P_3_acc | bbbbbbbbbbbbbbbbbbbbbbbee eb b bbb |
| Rel_acc | 6362366679999996998517101010152400 |
| SUB_acc | b.b..bbbbbbbbbbbbbbb.b.......b.b.. |

[0408] The third tool that used is the hydrophobicity analysis. In general, the structural core of a protein tends to be a hydrophobic cluster flanked by stretch of hydrophilic residues. Therefore the predicted boundaries should not locate in the center of hydrophobic core, rather should reside in the flanking hydrophilic regions. Hydrophobicity of B/Lee/40 HA sequence (SEQ ID NO: 36) was plotted using ProtScale (http://ca.expasy.org/tools→Primary structure analysis→ProtScale). The hydrophobicity analysis of B/Lee/40 sequence confirmed that the selected boundaries were in the hydrophilic regions of the protein (FIG. 2). The hydrophobicity strength used in the plot is listed in the following table:

[0409] Sequence Length: 584

Using the scale Hphob./Kyte & Doolittle, the individual values for the 20 amino acids are:

| | | | | | | | | | | | |
|---|---|---|---|---|---|---|---|---|---|---|---|
| Ala: | 1.800 | Arg: | −4.500 | Asn: | −3.500 | Asp: | −3.500 | Cys: | 2.500 | Gln: | −3.500 |
| Glu: | −3.500 | Gly: | −0.400 | His: | −3.200 | Ile: | 4.500 | Leu: | 3.800 | Lys: | −3.900 |
| Met: | 1.900 | Phe: | 2.800 | Pro: | −1.600 | Ser: | −0.800 | Thr: | −0.700 | Trp: | −0.900 |
| Tyr: | −1.300 | Val: | 4.200 | Asx: | −3.500 | Glx: | −3.500 | Xaa: | −0.490 | | |

[0410] In order to identify the HA 1-1 and HA1-2 domain boundaries of other influenza B molecules, such as B/Malaysia/2506/2004 (SEQ ID NO: 42), B/Ohio/1/2005 (SEQ ID NO: 43), B/Victoria/2/87 lineage (SEQ ID NO: 785) and B/Shanghai/361/2002 (SEQ ID NO: 44), and B/Yamagata/16/88 lineage (SEQ ID NO: 213), each HA sequence was aligned with B/Lee/40 HA sequence (SEQ ID NO: 36). The results indicated that influenza B HA proteins are much more conserved compared to influenza A HA proteins, especially in the domain boundary sequences. Thus, the boundaries identified in B/Lee/40 were used to direct boundary selections of other influenza B strains. The resulting domain boundaries for each strain are summarized below.

[0411] B/Malaysia/2506/2004: HA1-1 44-337 (SEQ ID NO: 45) (TTTPTK (SEQ ID NO: 287)-CPIWVK (SEQ ID NO: 288)) HA1-2 56-296 (SEQ ID NO: 46) (KGTETR (SEQ ID NO: 289)-SKVIKG (SEQ ID NO: 290))

[0412] B/Ohio/1/2005: HA1-1 33-326 (SEQ ID NO: 47) (TTTPTK (SEQ ID NO: 291)-CPIWVK (SEQ ID NO: 292)) HA1-2 45-285 (SEQ ID NO: 48) (KGTKTR (SEQ ID NO: 293)-SKVIKG (SEQ ID NO: 294))

[0413] B/Shanghai/361/2002: HA1-1 33-325 (SEQ ID NO: 49) (TTTPIK (SEQ ID NO: 295)-CPIWVK (SEQ ID NO: 296)) HA1-2 45-284 (SEQ ID NO: 50) (KGTRTR (SEQ ID NO: 297)-SKVIKG (SEQ ID NO: 298))

| | | | |
|---|---|---|---|
| BMal | ----IVLLMVVTSNADRICTGITSSNSPHVVKTATQGEVNVTGVIPLTTT | 50 | (SEQ ID NO: 42) |
| BOhi | ---------------DRICTGITSSNSPHVVKTATQGEVNVTGVIPLTTT | | (SEQ ID NO: 43) |
| BLee | MKAIIVLLMVVTSNADRICTGITSSNSPHVVKTATQGEVNVTGVIPLTTT | | (SEQ ID NO: 36) |
| BSha | ---------------DRICTGITSSNSPHVVKTATQGEVNVTGVIPLTTT | | (SEQ ID NO: 44) |
| | *********************************** | | |
| BMal | PTKSHFANLKGTETRGKLCPKCLNCTDLDVALGRPKCTGNIPSARVSILH | 100 | |
| BOhi | PTKSHFANLKGTKTRGKLCPKCLNCTDLDVALGRPKCTGNIPSAEVSILH | | |
| BLee | PTKSHFANLKGTQTRGKLCPNCFNCTDLDVALGRPKCMGNTPSAKVSILH | | |
| BSha | PIKSHFANLKGTRTRGKLCPDCLNCTDLDVALGRPMCVGTTPSAKASILH | | |
| | * **********.*******.*:************ * *. ***..**** | | |
| BMal | EVRPVTSGCFPIMHDRTKIRQLPNLLRGYEHIRLSTHNVINAENAPGGSY | 150 | |
| BOhi | EVRPVTSGCFPIMHDRTKIRQLPNLLRGYEHIRLSTHNVINAEKAPGGPY | | |
| BLee | EVKPATSGCFPIMHDRTKIRQLPNLLRGYENIRLSTSNVINTETAPGGPY | | |
| BSha | EVRPVTSGCFPIMHDRTKIRQLPNLLRGYENIRLSTQNVIDAEKALGGPY | | |
| | **:*.*************************:***** ***::*.* **.* | | |
| BMal | KIGTSGSCPNVTNGNGFFATMAWAVPKNDNNKTATNSLTIEVPYICTEGE | 200 | |
| BOhi | KIGTSGSCPNVTNGNGFFATMAWAVPKNDNNKTATNSLTIEVPYICTEGE | | |
| BLee | KVGTSGSCPNVANGNGFFNTMAWVIPK-DNNKTAINPVTVEVPYICSEGE | | |
| BSha | RLGTSGSCPNATSKSGFFATMAWAVPK-DNNKNATNPLTVEVPYICTEGE | | |
| | ::********.:. .*** ****.:** ****.* *.:*:******:*** | | |
| BMal | DQITVWGFHSDNEAQMAKLYGDSKPQKFTSSANGVTTHYVSQIGGFPNQT | 250 | |
| BOhi | DQITIWGFHSDSETQMAKLYGDSKPQKFTSSANGVTTHYVSQIGGFPNQT | | |
| BLee | DQITVWGFHSDDKTQMERLYGDSNPQKFTSSANGVTTHYVSQIGGFPNQT | | |
| BSha | DQITVWGFHSDDKTQMKNLYGDSNPQKFTSSANGVTTHYVSQIGGFPDQT | | |
| | ****:******.::** .*****:***********************:** | | |
| BMal | EDGGLPQSGRIVVDYMVQKSGKTGTITYQRGILLPQKVWCASGRSKVIKG | 300 | |
| BOhi | EDGGLPQSGRIVVDYMVQKSGKTGTITYQRGILLPQKVWCASGRSKVIKG | | |
| BLee | EDEGLKQSGRIVVDYMVQKPGKTGTIVYQRGILLPQKVWCASGRSKVIKG | | |
| BSha | EDGGLPQSGRIVVDYMVQKPGKTGTIVYQRGVLLPQKVWCASGRSKVIKG | | |
| | ** ** *************.******.****:****************** | | |
| BMal | SLPLIGEADCLHEKYGGLNKSKPYYTGEHAKAIGNCPIWVKTPLKLANGT | 350 | |
| BOhi | SLPLIGEADCLHEKYGGLNKSKPYYTGEHAKAIGNCPIWVKTPLKLANGT | | |
| BLee | SLPLIGEADCLHEKYGGLNKSKPYYTGEHAKAIGNCPIWVKTPLKLANGT | | |
| BSha | SLPLIGEADCLHEKYGGLNKSKPYYTGEHAKAIGHCPIWVKTPLKLANGT | | |
| | **********************************:*************** | | |
| BMal | KYRPPAKLLKER-------------------------------------- | 400 | |
| BOhi | KYRPPAKLLKERGF------------------------------------ | | |
| BLee | KYRPPAKLLKERGFFGAIAGFLEGGWEGMIAGWHGYTSHGAHGVAVAADL | | |
| BSha | KYRP---------------------------------------------- | | |
| | **** | | |

[0414] B/Lee/40 HA1-1 construct design (SEQ ID NO: 38). For this construct, five (5) anticipated conserved disulfide bonds were preserved by making the amino terminal truncation before the Cysteine at position 69 and the carboxyl-terminal truncation after the Cysteine at position 335 of SEQ ID NO: 36. The likely disulfide pairings are as the following: C69 and C72, C75 and C87, C109 and C158, C195 and C289, C309 and C335 of SEQ ID NO: 36. Using the simulated structures and the MMDB to check secondary structures the amino terminal truncation was made at the Theonine at position 48, right after the β-strand kink introduced by Proline 46 followed by Leucine 47 of SEQ ID NO: 36, such that the preceding β-strand [TGVI, SEQ ID NO: 299, residues 42-45 of SEQ ID NO: 36] was totally eliminated while the entire short β-strand formed by residues TTTP (SEQ ID NO: 300) [residues 48-51 of SEQ ID NO: 36] was preserved. The carboxyl-terminal truncation was made at the end of β-strand PIWV (SEQ ID NO: 301) [residues 336-340 of SEQ ID NO: 36] following the Cysteine at position 335 such that the carboxyl-terminal tail which interacts with HA2 was completely eliminated. Six β-strands including the C-terminal β-strand form a stable β-sandwich defined by β-strands PIWV (SEQ ID NO: 301) [residue 336-340 of SEQ ID NO: 36], PYYTG (SEQ ID NO: 302) [residues 322 to 326 of SEQ ID NO: 36] and TTTP (SEQ ID NO: 300) [residues 48-51 of SEQ ID NO: 36] (lower β-pleated sheet), and the β-strands DCLHE (SEQ ID NO: 303) [residues 308-312 of SEQ ID NO: 38], YGGLN (SEQ ID NO: 304) [residue 314-318 of SEQ ID NO: 36] and KAIGN (SEQ ID NO: 305) [residues 330-334 of SEQ ID NO: 36] (top β-pleated sheet). This set of β-pleated sheet includes both the amino-terminus and carboxyl-terminus within one stable secondary structure element. Such truncations were made to believe resulting a compact domain structure.

[0415] B/Lee/40 HA1-2 construct design (SEQ ID NO: 39). For this construct four (4) anticipated conserved disulfide bonds were preserved by making the amino-terminal truncation before the Cysteine at position 69 and the carboxyl-terminal truncation after the Cysteine at position 289 of SEQ ID NO: 36. Using the simulated structure and the MMDB to check secondary structures the amino-terminal truncation was made in the loops that connect two distinct sets of β-pleated sheets. The amino-terminal truncation was made at the Lysine at position 60, such that the β-strand comprising residues 62-66 of SEQ ID NO: 36 [TQTRG, SEQ ID NO: 306] of the membrane-distal set of β-strands remained wholly intact, while the membrane-proximal β-strand [TTTP, SEQ ID NO: 300, residues 48-51 of SEQ ID NO: 36] that forms part of HA1-1 was completely eliminated. The carboxyl-terminal truncation was made at the Serine 300 of SEQ ID NO: 36. Truncation at this position preserved secondary structure such that the membrane-distal β-strand [KVIKG, SEQ ID NO: 307, residues 295-299 of SEQ ID NO: 36] remained intact while the membrane-proximal β-strand [DCLHE, SEQ ID NO: 308, residues 308-312 of SEQ ID NO: 36] was eliminated. The membrane-distal β-pleated sheets comprising β-strands TQTRG (SEQ ID NO: 306) [residues 62-66 of SEQ ID NO: 36], SILHEV (SEQ ID NO: 309) [residues 97-102 of SEQ ID NO: 36], and KVIKG (SEQ ID NO: 307) [residues 295-299 of SEQ ID NO: 36] serve as the stabilizing secondary structure element that is believed to conclude a compact domain structure.

[0416] B/Malaysia/2506/2004, B/Ohio/1/2005 and B/Shanghai/361/2002 follow the same reference structure as described above.

### Example 3

### Cloning and Expression of Recombinant Flagellin-Hemagglutinin Fusion Proteins in E. Coli

### Materials and Methods

[0417] Cloning of HA influenza A subunits. Subunits of the HA globular head from several strains of influenza A were cloned and expressed alone or as fusions with flagellin. We also expressed in fusion with the HA globular head domain, two proteins widely used as carrier proteins in conjugated vaccines. CRM-197 is a mutated diphtheria toxin (DTx) from Corynebacterium diphtheriae and LTB, is E. coli heat labile toxin B subunit.

[0418] These constructs were generated in one of four different methodologies:

[0419] Method #1: In this protocol, a fusion gene comprising flagellin (STF2) (SEQ ID NO: 212) and the HA subunit was codon-optimized for E. coli expression and obtained from a commercial vendor (DNA2.0 Inc., Menlo Park, Calif.) by chemical synthesis. The gene was excised with NdeI and BlpI enzymes, the insert fragment was gel purified and ligated to pET24a (Novagen, San Diego, Calif.) which had been digested with NdeI and BlpI and treated with bacterial alkaline phosphatase (BAP).

[0420] Method #2: For facile cloning of genes in fusion with flagellin, a cassette plasmid containing a unique BlpI site at the 3′ end of the flagellin (STF2) gene (SEQ ID NO: 212) was generated. This was done by introducing a silent mutation at nucleotides 5′-GTGCTGAGCCTGTTACGT-3′ (SEQ ID NO: 310) [nt 1501 to 1518 of SEQ ID NO: 212] of STF2 creating the unique BlpI site in the plasmid cassette, pET24/STF2.blp (SEQ ID NO: 51). Synthetic genes for each target antigen were codon-optimized for E. coli expression and obtained from a commercial vendor (DNA2.0 Inc., Menlo Park, Calif.). The synthetic genes were excised with BlpI enzyme and ligated by compatible ends to pET24/STF2.blp which had been treated with BlpI and BAP.

[0421] Method #3: Using forward and reverse primers (Keck Foundation BRLK, Yale University, New Haven, Conn.; Midland Certified Reagent Company, Midland, Tex.) as indicated for each construct, PCR amplification was performed using the DNA templates shown in each table. The PCR product was subjected to BlpI digestion, gel-purified and ligated to pET24/STF2.blp (SEQ ID NO: 51) vector previously prepared by BlpI digestion and BAP treatment.

[0422] Method #4: A plasmid cassette, pET24/STF2.SG (SEQ ID NO: 52), was generated by introducing a flexible heptamer linker, Ser-Gly-Ser-Gly-Ser-Gly-Ser (S-G-S-G-S-G-S (SEQ ID NO: 311)) at the 3′end of the STF2 gene. A unique BamHI site was created in the linker to facilitate cloning of HA subunit fragments in fusion with flagellin. Synthetic genes codon-optimized for expression in E. coli were obtained from a commercial vendor (DNA2.0 Inc., Menlo Park, Calif.), excised from the parental plasmids with BamHI and BlpI restriction endonucleases, and ligated by compatible ends to the pET24/STF2 cassette that had previously been digested with BamHI and BAP-treated.

[0423] In each case, the constructed plasmids were used to transform competent E. coli TOP10 cells and putative recombinants were identified by PCR screening and restriction mapping analysis. The integrity of the constructs was verified by DNA sequencing and they were used to transform the expression host, BLR3 (DE3) (Novagen, San Diego, Calif.; Cat #69053). Transformants were selected on plates containing kanamycin (50 μg/mL), tetracycline (5 μg/mL) and glucose (0.5%). Colonies were picked and inoculated into 2 ml of LB medium supplemented with 25 μg/ml kanamycin, 12.5 μg/ml tetracycline and 0.5% glucose and grown overnight. Aliquots of these cultures were used to inoculate fresh cultures in the same medium formulation, which were cultured until they reached an OD₆₀₀=0.6, at which time protein expression was induced by the addition of 1 mM IPTG and culturing for 3 hours at 37° C. The cells were harvested and analyzed for protein expression.

[0424] SDS-PAGE and Western blot: Protein expression and identity were determined by gel electrophoresis and immunoblot analysis. Cells were harvested by centrifugation and lysed in Laemmli buffer. An aliquot of 10 μl of each lysate was diluted in SDS-PAGE sample buffer with or without 100 mM DTT as a reductant. The samples were boiled for 5 minutes and loaded onto a 10% SDS polyacrylamide gel and electrophoresed (SDS-PAGE). The gel was stained with Coomassie R-250 (Bio-Rad; Hercules, Calif.) to visualize protein bands. For western blot, 0.5 μl/lane cell lysate was electrophoresed and electrotransfered to a PVDF membrane and blocked with 5% (w/v) dry milk.

[0425] The membrane was then probed with either anti-flagellin antibody (Inotek; Beverly, Mass.) or influenza A PR/8/38 convalescent immune mouse serum. PR/8/34 immune serum was generated in BALB/c mice (Jackson Laboratory, Bar Harbor, Me.) that received an experimentally determined sublethal challenge dose of 8×10¹ egg infectious dosages (EID) of PR/8/34 influenza virus. Animals were then allowed to convalesce for >21 days post-infection at which time immune serum was isolated and clarified. After probing with alkaline phosophatase-conjugated secondary antibodies (Pierce; Rockland, Ill.), protein bands were visualized with an alkaline phosphatase chromogenic substrate (Promega, Madison, Wis.). Bacterial clones which yielded protein bands of the correct molecular weight and reactive with the appropriate antibodies were selected for production of protein for use in biological assays.

[0426] The constructs derived from the HA of A/Puerto Rico/8/34 strain (PR8) (SEQ ID NO: 1) and listed in Table 1 were made by the synthetic gene route as described in Method #1 and Method #4. Similarly, the constructs derived from the A/Viet Nam/1203/2004 strain (SEQ ID NO: 2) are shown in Table 2, the constructs derived from the HA of A/Indonesia/2005 strain (IND) (SEQ ID NO: 3) are described in Table 3, and those from A/New Calcdonia/12/99 strain (NC) (SEQ ID NO: 4) are described in Tables 4. “IND” as used herein, refers to “Indonesia.” Where appropriate, the DNA primers and DNA templates used in the PCR amplification reaction are listed in the same table.

TABLE 1
PR8 HA constructs for expression in E coli

| SEQ ID NO: | Construct | Method |
|---|---|---|
| 53 | STF2.HA1-1 | #4 |
| 54 | STF2.HA1-1.his | #4 |
| 55 | STF2.HA1-2 | #1 |
| 56 | STF2.HA1-2mut | #1 |
| 57 | STF2.HA1-3 | #1 |
| 58 | STF2.HA1-3mut | #1 |
| 59 | HA1-1 | #1 |
| 60 | HA1-1.his | #1 |
| 61 | HA1-2.his | #1 |
| 62 | CRM.HA1-2 | #1 |
| 63 | LTB.HA1-2 | #1 |

TABLE 2
VN HA constructs for expression in E coli

| | | | FOR Primer | REV Primer | DNA Template |
|---|---|---|---|---|---|
| SEQ ID NO: | Construct | Method | SEQ ID NO: | SEQ ID NO: | SEQ ID NO: |
| 64 | STF2.HA1-1 | #3 | 65 | 66 | 67 |
| 68 | STF2.HA1-2 | #3 | 69 | 70 | 67 |
| 71 | STF2.HA1-2mut | #2 | N/A | N/A | 72 |

TABLE 3
IND HA constructs for expression in E coli

| | | | FOR Primer | REV Primer | DNA Template |
|---|---|---|---|---|---|
| SEQ ID NO: | Construct | Method | SEQ ID NO: | SEQ ID NO: | SEQ ID NO: |
| 73 | STF2.HA1-1 | #3 | 74 | 66 | 75 |
| 76 | STF2.HA1-2 | #3 | 69 | 77 | 75 |
| 78 | STF2.HA1-2mut | #2 | N/A | N/A | 79 |

TABLE 4
NC HA constructs for expression in E coli

| | | | FOR Primer | REV Primer | DNA Template |
|---|---|---|---|---|---|
| SEQ ID NO: | Construct | Method | SEQ ID NO: | SEQ ID NO: | SEQ ID NO: |
| 80 | STF2.HA1-1 | #3 | 81 | 82 | 83 |
| 84 | STF2.HA1-2 | #3 | 85 | 86 | 83 |
| 87 | STF2.HA1-2mut | #2 | N/A | N/A | 88 |

### Results

[0427] Protein carriers have widespread application in human vaccines. The cross-reactive material (CRM₁₉₇) of diphtheria toxin is considered to be advantageous as a carrier molecule in the formulation of several conjugate vaccines. Exemplary carriers include E. coli heat labile enterotoxin (LT) and its B subunit (LTB), Tetanus toxoid (TT) and cholera toxin (CT). Using CRM₁₉₇ and LTB as representatives of this group of carrier proteins, we have generated constructs in which the globular head of HA of (A/Puerto Rico/8/34 strain (PR8) (SEQ ID NO: 1) is fused to the 3′ end of either CRM197 gene or LTB gene as described in Method #1 generating the constructs CRM.HA1-2 (SEQ ID NO: 62) and LTB.HA1-2(SEQ ID NO: 63). The constructs were verified by DNA sequencing and used to transform the expression host, BLR3 (DE3) (Novagen, San Diego, Calif.; Cat #69053).

[0428] Transformants were selected on plates containing kanamycin (50 μg/mL), tetracycline (5 μg/mL) and glucose (0.5%). Several colonies were picked for an overnight culture which were was used to inoculate a fresh LB medium supplemented with 25 μg/ml kanamycin, 12.5 μg/ml tetracycline and 0.5% glucose. At an OD600=0.6 protein expression was induced with 1 mM IPTG for 3 h at 37° C. The cells were harvested and an aliquot of the lysate was analyzed on 10% SDS-PAGE by Coomassie blue staining and by immunoblot using PR/8/34 convalescent sera. In the case of CRM.HA1-2 construct several clones were picked and analyzed for expression by SDS-PAGE.

[0429] As assayed by Coomassie blue staining of the SDS-PAGE gel, all the clones displayed a band that migrated with an apparent MW 84 KDa and that corresponds to the predicted MW. The absence of this band in the control culture (without IPTG) indicates that it is specifically induced by IPTG. This observation was further confirmed when the cell extracts of two clones #5 and #6 was fractionated in the presence or absence of a reducing agent (5 mM DTT). While the recombinant protein whose disulphide bonds have been disrupted by treatment with DTT is not recognized by the cognate antibodies, the native recombinant protein is. Similarly, a clone expressing construct LTB.HA1-2 displays a band corresponding to the predicted molecular weight of 39.8 KDa, protein when induced with IPTG. The identity of LTB-HA1-2 fusion protein is confirmed by western blot analysis using mouse convalescent serum. This band is diminished in intensity when a reductant (β-mercaptoethanol) was present. This latter observation suggests that insufficient amount of reductant was most likely employed in the experiment. Taken together the data presented herein support the notion that the globular head of HA can be successfully fused to carrier proteins to generate conformational sensitive proteins.

### Cloning of Recombinant Flagellin-Hemagglutinin Fusion Proteins in E. Coli

[0430] Cloning of HA Influenza B subunits. Subunits of the HA globular head from several strains of influenza B were cloned and expressed as fusions with flagellin. These constructs were generated by a two-step PCR.

[0431] The HA subunit was codon-optimized for E. coli expression and obtained from a commercial vendor (DNA2.0 Inc., Menlo Park, Calif.) by chemical synthesis. The HA1-1 or HA1-2 was PCR amplified using the synthesized DNA as templates. The flagellin (STF2) sequence (SEQ ID NO: 212) was derived from the plasmid pET24a-STF2.HA1-2. The STF2 DNA fragment was PCR amplified, and the C-terminal of the PCR product has a 28-30 bp overlap with the N-terminal sequence of the fusion HA subunit.

[0432] The STF2 and HA subunits were fused together by a 2^{nd} PCR. Using respective forward and reverse primers (Integrated DNA Technologies, Inc, Coralville, Iowa 52241) listed below, fusion protein DNA was amplified from the DNA templates also shown below. The PCR product was subsequently subjected to XbaI digestion, gel-purification and ligation to pET24a-STF2.HA1-2 that was previously digested with XbaI and SnaBI.

[0433] The constructs are listed below, where appropriate, the DNA primers and DNA templates used in the PCR amplification reaction are also listed.

FluB STF2.HA constructs for expression in E coli

| SEQ | | | | DNA |
|---|---|---|---|---|
| ID | | FOR Primer | REV Primer | Template |
| NO: | Construct | SEQ ID NO: | SEQ ID NO: | SEQ ID NO: |
| 184 | STF2.HA1-1 (MAL) | 193, 195 | 194, 196 | 55, 183 |
| 186 | STF2.HA1-2 (MAL) | 193, 198 | 197, 199 | 55, 185 |
| 188 | STF2.HA1-2 (SH) | 193, 201 | 200, 202 | 55, 187 |
| 190 | STF2.HA1-2 (Lee) | 193, 204 | 203, 205 | 55, 189 |
| 192 | STF2.HA1-2 (Ohio) | 193, 207 | 206, 208 | 55, 191 |

[0434] In each case, the constructed plasmids were used to transform competent E. coli DH5α cells and putative recombinants were identified by restriction mapping. The integrity of the constructs was verified by DNA sequencing and was used to transform the expression host, BLR3 (DE3) (Novagen, San Diego, Calif.; Cat #69053). Transformants were selected on LB (Veggie peptone, EMD Bioscience, La Jolla, Calif.; Cat#71280; veggie yeast extract, EMD Bioscience, Cat# 71279;) plates containing kanamycin (35 μg/mL). Colonies were picked and inoculated into 2 ml of LB (Veggie) medium supplemented with 35 μg/ml kanamycin and grown overnight. Aliquots of these cultures were used to inoculate fresh cultures in the same medium formulation, which were cultured until OD₆₀₀=0.6 was reached. The protein expression was induced by the addition of 1 mM IPTG. The cells were harvested after 2 hours culturing at 37° C. and analyzed for protein expression.

[0435] SDS-PAGE and Western blot: Protein expression and identity were determined by gel electrophoresis and immunoblot analysis. Cells were harvested by centrifugation and lysed in Tris/NaCl (50 mM Tris, 200 mM NaCl, pH 8.0) buffer. Two aliquots of each lysate was diluted in SDS-PAGE sample buffer and boiled for 5 minutes. One aliquot sample was reduced by DTT (200 mM final concentration, EMD Bioscience, La Jolla, Calif. 92039; Cat#233155). The samples (1.5 μl/lane cell lysate) were loaded onto a 4-12% SDS polyacrylamide gel and electrophoresed (SDS-PAGE). The gel was stained with Coomassie R-250 (Bio-Rad; Hercules, Calif.) to visualize protein bands.

[0436] For Western blot, the duplicated gel was electrophoresed and electrotransfered to a PVDF membrane and blocked with 5% (w/v) dry milk. The membrane was then probed with either anti-flagellin antibody (6H11, Inotek, Beverly, Mass.; Lot#1030B5) or ferret antiserum raised against B/Malaysia (2506/2004, CDC#2005741987). After probing with Horseradish Peroxidase (HRP)-conjugated secondary antibodies (1:10,000) (Goat anti-Mouse is from Jackson ImmunoResearch Laboratories; West Grove, Pa. Goat anti-Ferret is from Bethyl Laboratories; Montgomery, Tex.), protein bands were visualized after with addition of TMB, an HRP chromogenic substrate (Pierce; Rockland, Ill.; Cat#34018). The approximate molecular weight of STF2.HA1-1(MAL) is 84 kDa; and the approximate molecular weight of STF2.HA1-2 (MAL and SH) is ˜78 kDa. Two micrograms of STF2.4×M2e fusion protein was loaded as a positive control for the anti-flagellin antibody and a negative control for the anti-HA sera. Virus lysate (B/Malaysia/2506/04, CDC# 2005756250) was included in the experiment as a positive control for the anti-HA sera and a negative control for the anti-flagellin antibody. Commassie blue staining of the gel showed low induction of STF2.HA1-1(MAL) protein; but much stronger bands for STF2.HA1-2(MAL) and STF2.HA1-2(SH) proteins. Western blot analysis using anti-flagellin monoclonal antibodies (1:4000) exhibited a strong positive band around 84 kDa for lanes loaded with STF2.HA1-1(MAL), and around 75 kDa in lanes loaded with STF2.HA1-2(MAL) or STF2.HA1-2(SH). The induction pattern of each fusion protein on the Western is very similar to the result for the commassie blue stained gel. The level of the non-reduced and the reduced protein recognized by the anti-flagellin was comparable. The positive control for anti-flagellin (STF2.4×M2e) showed s single strong band, and the negative control exhibited no signal.

[0437] Western blot analysis using anti-HA polyclonal anti-sera (1:1000) exhibited a similar pattern as the blot with anti-flagellin, except that the reduced STF2.HA1-2 protein had a diminished signal compared to that of the non-reduced sample, indicating that a substantial portion of the anti-HA polyclonal antibodies in the antiserum recognize conformational epitopes formed by correct disulfide-bond formation while a small proportion of the antibodies in the anti-sera recognize linear epitopes that are not reliant on disulfide bound formation. Similar were observed using a capture ELISA assay. It is worth noting that anti-serum against B/Malaysia/2506/2004 (Victoria lineage) also recognizes B/Shanghai/361/2002, which belongs to Yamagata lineage. This result indicates that these two lineages not only share substantial primary sequence similarity, but also share tertiary structure.

[0438] The Western blot and ELISA results confirm the expression of functional Influenza B HA1-1 and HA1-2 fusion proteins in E. coli.

### Example 4

### Purification and Biochemical Characterization of Recombinant Flagellin-Hemagglutinin Fusion Proteins

### Materials and Methods

[0439] Bacterial growth and cell lysis: HA constructs were expressed in the E. coli host strain BLR (DE3). E. coli cells carrying a plasmed encoding STF2.HA1-1.his(PR8) (SEQ ID NO: 54) were cultured and harvested as described above. Individual strains were retrieved from glycerol stocks and grown in shake flasks to a final volume of 12 L. Cells were grown in LB medium containing 50 μg/ml kanamycin/12.5 μg/ml tetracycline/0.5% dextrose to OD₆₀₀=0.6 and induced with 1 mM IPTG for 3 h at 37° C. The cells were harvested by centrifugation (7000 rpm×7 minutes in a Sorvall RC5C centrifuge) and resuspended in 1×PBS, 1% glycerol, 1 μg/ml DNAseI, 1 mM PMSF, protease inhibitor cocktail and 1 mg/ml lysozyme. The cells were then lysed by two passes through a microfluidizer at 15,000 psi. The lysate was centrifuged at 45,000 g for one hour in a Beckman Optima L ultracentrifuge (Beckman Coulter; Fullerton, Calif.) to separate the soluble and insoluble fractions

[0440] Purification and refolding of STF2.HA1-1.his(PR8) (SEQ ID NO: 89) protein from E. coli. Following lysis and centrifugation, the insoluble (pellet) fraction was resuspended in 100 ml 1×TBS, pH 8.0+1 mM β-mercaptoethanol and solid urea was added to a final concentration of 6.2 M. After resuspension with a Dounce glass-ball homogenizer the mixture was centrifuged as described above. The resulting supernatant was loaded onto a chelating sepharose column (GE/Amersham Biosciences; Piscataway, N.J.) charged with NiSO₄ and equilibrated in Buffer A [20 mM Tris, pH 8.0/8 M urea/0.5 M NaCl].

[0441] After washing with 1 L buffer B [Buffer A+1% (w/v) TX-100] the column was eluted in a 5-column volume linear gradient from 100% Buffer A to 100% Buffer C [Buffer A+0.5 M imidazole]. Peak fractions were pooled, concentrated 3.5 fold on an Amicon 15 spin concentrator (Millipore; Billerica, Mass.) and dialyzed against 3×2 L of 8 M urea/20 mM Tris, pH 8.0/2 mM EDTA. Following dialysis, STF2.HA1-1.his(PR8) (SEQ ID NO: 89) was refolded by rapid dilution to a final concentration of 0.1 mg/ml protein in Refolding Buffer [0.1 M Tris, pH 8.0/0.1 M NaCl/1% (w/v) glycerol/5 mM reduced glutathione/1 mM oxidized glutathione] and incubated overnight at room temperature.

[0442] The refolded protein was then captured on a 5 ml chelating sepharose HiTrap column (GE/Amersham Biosciences; Piscataway, N.J.) charged with NiSO₄ and equilibrated in Buffer D [20 mM Tris, pH 8.0/0.5 M NaCl/1 mM reduced glutathione/0.2 mM oxidized glutathione] and eluted in 100% Buffer E [Buffer D+0.5 M imidazole]. Peak eluate fractions were pooled, concentrated using an Amicon 15 spin concentrator (Millipore; Billerica, Mass.) and fractionated on a Superdex 200 size-exclusion column (GE/Amersham; Piscataway, N.J.) equilibrated in 1×TBS, pH 8.0+0.5% (w/v) Na deoxycholate. 5200 peak fractions were pooled, dialyzed against 3×2 L of 1×TBS, pH 8.0 (without deoxycholate), vialed and stored at −80° C.

[0443] Purification of STF2.HA1-2(PR8) (SEQ ID NO: 90) and STF2.HA1-2mut(PR8) (SEQ ID NO: 91): E. coli cells carrying a plasmid encoding STF2.HA1-2.his (PR8) (SEQ ID NO: 55) were cultured and harvested as described above. Following lysis and centrifugation, the insoluble (pellet) fraction containing STF2.HA1-2(PR8) was reuspended and homogenized in 50 mM Tris, pH 8.0+0.5% (w/v) Triton X-100 using a Dounce homogenizer. The homogenate was then centrifuged (19,000 rpm×10 min). The resulting pellet fraction was then re-homogenized in 50 mM Tris, pH 8.0+0.5% (w/v) Triton X-100+1.0 M NaCl and centrifuged. The inclusion body fraction (pellet) was then dissolved in buffer A [50 mM Na Acetate, pH 4.0+8.0 M urea] and centrifuged (19,000 rpm×10 min.) to remove insoluble debris.

[0444] The resulting supernatant was fractionated on a Source S column (GE/Amersham Biosciences; Piscataway, N.J.) equilibrated in Buffer A and eluted in a 5 column-volume linear gradient with Buffer B (50 mM Na Acetate, pH 4.0, 1.0 M NaCl). The protein was then refolded by rapid dilution into Buffer C (100 mM Tris-HCl, pH 8.0). The refolded protein was then fractionated on a Q sepharose HP column (GE/Amersham Biosciences; Piscataway, N.J.) equilibrated in Buffer C and eluted in a 0% to 60% linear gradient with buffer D (Buffer C+1 M NaCl). The Q HP eluate was then fractionated on a Superdex 200 size exclusion chromatography (SEC) column (GE/Amersham Biosciences; Piscataway, N.J.) equilibrated with 1× Tris-buffered saline, pH 8.0, to separate monomeric from aggregated protein. Monomeric fractions were then pooled, aliquoted and stored at −80° C.

[0445] Purification of STF2.HA1-3(PR8) (SEQ ID NO: 92): E. coli cells carrying a plasmed encoding STF2.HA1-3 (PR8) (SEQ ID NO: 57) were cultured and harvested as described above. Following lysis and centrifugation the soluble (supernatant) fraction containing STF2.HA1-3(PR8) was adjusted to 6.2 M urea, 100 mM DTT and incubated at room temperature overnight to completely reduce and denature the protein. The protein was then diluted five-fold in Buffer A (50 mM citric acid, pH 3.5, 8 M urea, 1 mM β-mercaptoethanol, 1 mM EDTA) and loaded onto an SP sepharose FF column (GE/Amersham Biosciences; Piscataway, N.J.) equilibrated with Buffer A. To remove endotoxin, the column was washed with 10 column volumes of Buffer B (Buffer A+1% (w/v) Triton X-100) followed by 10 column volumes Buffer C (50 mM citric acid, pH 3.5, 1 mM β-mercaptoethanol, 1 mM EDTA, 70% (v/v) isopropanol).

[0446] The bound protein was then eluted in a five column-volume linear gradient of Buffer A:Buffer D (Buffer A+1M NaCl). The eluted protein was then dialyzed to Buffer E (20 mM Tris, pH 8.5, 8 M urea, 1 mM β-mercaptoethanol, 1 mM EDTA) and passed through a Source Q column (GE/Amersham Biosciences; Piscataway, N.J.). The STF2.HA1-3(PR8) (SEQ ID NO: 92) protein was collected in the flow-thru fraction. The protein was concentrated using Amicon spin-concentrators (Millipore; Billerica, Mass.) and dialyzed to Buffer F (20 mM Tris, pH 8.0, 8 M urea, 1 mM EDTA) to remove reductant. The denatured polypeptide was then refolded by rapid dilution to a final concentration of 0.1 mg/ml in Refolding Buffer (0.1 M Tris, pH 8.0, 0.1 M NaCl, 1% (w/v) glycerol, 5 mM reduced glutathione, 1 mM oxidized glutathione) and incubated overnight at room temperature. The refolded protein was then fractionated on a Superdex 200 size exclusion column equilibrated in 1× Tris-buffered saline (TBS), pH 8.0, plus 0.25% (w/v) sodium deoxycholate to separate monomeric STF2.HA1-3(PR8) from aggregated protein. Monomeric peak fractions were pooled, dialyzed to 1×TBS, pH 8.0, to remove deoxycholate, aliquoted and stored at −80° C.

[0447] Purification of HA1-2H is(PR8) (SEQ ID NO: 93): E. coli cells carrying a plasmed encoding STF2.HA1-2.his (PR8) (SEQ ID NO: 61) were cultured and harvested as described above. Following cell lysis the insoluble fraction was homogenized and washed once with Buffer A (50 mM Tris, pH 8.0), followed by sequential washing with Buffer A+0.5% (w/v) Triton X-100 and Buffer A+0.5% (w/v) Triton X-100+1M NaCl. The insoluble material was then washed twice more with Buffer A alone. The washed inclusion bodies were then dissolved in Buffer B (1×PBS, pH 7.4, 8 M urea) and applied to a Ni-NTA (Sigma-Aldrich; St. Louis, Mo.) column charged with NiSO₄ and eluted in a linear gradient of Buffer C (50 mM Tris, pH 8.0, 8 M urea, 0.3 M NaCl, 0.5 M imidazole). In order to reduce endotoxin, the eluted protein was dialyzed overnight against 1×PBS, pH 7.4, 8 M urea, and reapplied to the Ni-NTA column.

[0448] The column was then washed with Buffer D (10 mM Tris, pH 8.8, 8 M urea, 60% (v/v) isopropanol) and eluted as described above. Ni-NTA purified protein was then refolded by 1:10 (v/v) dilution into Refolding Buffer (50 mM Tris, pH 8.8). The refolded HA1-2 His(PR8) (SEQ ID NO: 93) protein was then concentrated using an Amicon ultrafiltration unit (Millipore; Billerica, Mass.) and applied to a Superdex 200 size exclusion column (GE/Amersham; Piscataway, N.J.) equilibrated in 1×TBS, pH 8.0. Monomeric peak fractions were pooled, aliqoted and stored at −80° C.

[0449] SDS-PAGE and western blot analysis: Protein identity of all HA constructs was determined, and purity estimated, by SDS-PAGE. An aliquot of 5 μg of each sample was diluted in SDS-PAGE sample buffer with or without 100 mM DTT as a reductant. The samples were boiled for 5 minutes and loaded onto a 10% SDS polyacrylamide gel (LifeGels; French's Forrest, New South Wales, AUS) and electrophoresed. The gel was stained with Coomassie R-250 (Bio-Rad; Hercules, Calif.) to visualize protein bands. For western blot, 0.5 μg/lane total protein was electrophoresed as described above and the gels were then electro-transfered to a PVDF membrane and blocked with 5% (w/v) dry milk before probing with anti-flagellin antibody (Inotek; Beverly, Mass.) or influenza A PR/8/34 Convalescent immune serum (described below under Protein Antigenicity ELISA). After probing with alkaline phosophatase-conjugated secondary antibodies (Pierce; Rockland, Ill.), protein bands were visualized with an alkaline phosphatase chromogenic substrate (Promega; Madison, Wis.).

[0450] Protein assay: Total protein concentration for all proteins was determined using the Micro BCA (bicinchoninic acid) Assay (Pierce; Rockford Ill.) in the microplate format, using bovine serum albumin as a standard, according to the manufacturer's instructions.

[0451] Endotoxin assay: Endotoxin levels for all proteins were determined using the QCL-1000 Quantitative Chromogenic LAL test kit (Cambrex; E. Rutherford, N.J.), following the manufacturer's instructions for the microplate method.

[0452] TLR5 bioactivity assay: HEK293 cells constitutively express TLR5, and secrete several soluble factors, including IL-8, in response to TLR5 signaling. Cells were seeded in 96-well microplates (50,000 cells/well), and the following test proteins were added and incubated overnight: STF2.HA1-1H is(PR8) (SEQ ID NO: 89); STF2.HA1-2(PR8) (SEQ ID NO: 90); STF2.HA1-2(PR8)mut (SEQ ID NO: 91); STF2.HA1-3(PR8) SEQ ID NO: 92); HA1-2H is(PR8) (SEQ ID NO: 93); STF2.HA1-2 (Mal) (SEQ ID NO: 211) supernatant; STF2. HA1-2 (Mal) (SEQ ID NO: 211) refolded; STF2.HA1-2 (SH) (SEQ ID NO: 211) supernatant; STF2.HA1-2 (SH) (SEQ ID NO: 211) refolded; STF2.HA1-1 (Mal) (SEQ ID NO: 209) supernatant; and STF2.HA1-1 (Mal) (SEQ ID NO: 209). The next day, the conditioned medium was harvested, transferred to a clean 96-well microplate, and frozen at −20° C. After thawing, the conditioned medium was assayed for the presence of IL-8 in a sandwich ELISA using an anti-human IL-8 matched antibody pair (Pierce, Rockland, Ill.; #M801E and #M802B) following the manufacturer's instructions. Optical density was measured using a microplate spectrophotometer (FARCyte, GE/Amersham; Piscataway, N.J.).

[0453] Protein antigenicity ELISA: To determine whether the recombinant fusion proteins displayed correctly folded epitopes of HA, the antigenicity of individual HA-fusion proteins was evaluated by ELISA. 96-well ELISA plates were coated overnight at 4° C. with serial dilutions in PBS (100 μl/well) of each target protein starting at 5 μg/ml. Plates were blocked with 200 μl/well of Assay Diluent Buffer (ADB; BD Pharmingen) for one hour at room temperature, then washed three times in PBS-T. A fixed dose of primary antibody was then added to each well.

[0454] To assay HA reactivity, 100 μl/well of a 1:10,000 dilution of non-immune or PR/8/34 convalescent immune serum in ADB was added. PR/8/34 immune serum was generated in BALB/c mice (Jackson Laboratory, Bar Harbor, Me.) that received an experimentally determined sublethal challenge dose of 8×10¹ egg infectious dosages (EID) of PR/8/34 influenza virus. Animals were then allowed to convalesce for >21 days post-infection at which time immune serum was isolated and clarified. For ELISA of flagellin or the 6× histidine tag, monoclonal antibody against 6× His (Invitrogen; Carlsbad, Calif.), or flagellin (Inotek; Beverly, Mass.) was added at 1 μg/ml in ADB (100 μl/well) and the plates were incubated for 1 hr at room temperature or overnight at 4° C. The plates were then washed three times with PBS-T. HRP-labeled goat anti-mouse IgG antibodies (Jackson Immunochemical; West Grove, Pa.) diluted in ADB were added (100 μl/well) and the plates were incubated at room temperature for 1 hour. The plates were washed three times with PBS-T. After adding TMB Ultra substrate (Pierce; Rockford, Ill.) and monitoring color development, A₄₅₀ was measured on a microplate spectrophotometer (FARCyte, GE/Amersham; Piscataway, N.J.).

### Results and Discussion

[0455] Protein yield and purity: Results for the purification of recombinant HA and STF2.HA fusion proteins produced in E. coli are shown in Table 6. All four proteins were produced in high yield, with estimated purity exceeding 90% and endotoxin well below the standard acceptable level of 0.1 EU/μg. The three STF2 fusion proteins also had very high in vitro TLR5 bioactivity while the HA1-2His₆ (SEQ ID NO: 93) protein, as expected, had no TLR5 activity.

TABLE 6

| | SEQ | | purity | | |
|---|---|---|---|---|---|
| | ID | yield | est. | endotoxin | TLR5 activity |
| protein | NO: | (mg) | (%) | (EU/μg) | (EC₅₀, ng/ml) |
| STF2.HA1-1His(PR8) | 89 | 6.4 | >90 | 0.04 | 0.2 |
| STF2.HA1-2(PR8) | 90 | 6.0 | >98 | 0.02 | 0.15 |
| STF2.HA1-2(PR8)mut | 91 | 12 | >95 | 0.01 | 1.2 |
| STF2.HA1-3(PR8) | 92 | 2.1 | >90 | 0.016 | 1.2 |
| HA1-2His(PR8) | 93 | 10 | >95 | 0.03 | nd |

[0456] Antigenicity of Influenza A HA proteins produced in E. coli.: All four recombinant proteins were analyzed by western blotting with antibody against STF2 (flagellin) (Inotek; Beverly, Mass.) and immune antisera collected from PR/8/34 convalescent mice. The three STF2 fusion proteins appeared to react comparably with anti-flagellin antibody. STF2.HA1-1H is(PR8) (SEQ ID NO: 89), STF2.HA1-2(PR8) (SEQ ID NO: 90) and HA1-2H is(PR8) (SEQ ID NO: 93) also reacted with anti-PR/8/34 convalescent serum. This reactivity was only seen in non-reduced protein samples; the addition of DTT to the sample buffer greatly diminished the signal. This finding suggests that the majority of the anti-HA antibodies in the convalescent serum are conformationally dependent and that proper disulfide bonding in HA is necessary for reactivity by western blot. In contrast to these results, STF2.HA1-3(PR8) (SEQ ID NO: 92) did not react efficiently with the convalescent serum and what little signal was produced was not affected by reductant. This finding suggested that the STF2.HA1-3 protein may not be capable of folding properly and/or presenting native HA epitopes.

### Capture ELISA for Influenza B Globular Head Proteins

[0457] The antigenicity of individual HA-fusion proteins was evaluated using capture ELISA. An anti-flagellin monoclonal antibody was used on the solid phase to capture these proteins. Ferret anti-sera raised on natural B/Malaysia/2506/2004 infection was used to detect the captured HA-fusion proteins. The results of this assay will determine whether the recombinant fusion proteins displayed correctly-folded epitopes of HA. Due to the considerable sequence homology between the different Influenza B HA globular head molecules, 84.6%, these antisera would be expected to react with both the Malaysian and the Shanghai globular head constructs.

### Preparation of Samples

[0458] E. coli cells expressing the STF2.HA1-2(Malaysia (SEQ ID NO: 210)), STF2.HA1-2 (Shanghai (SEQ ID NO: 211)), and STF2.HA1-1 (Malaysia (SEQ ID NO: 209)) recombinant proteins were pelleted by centrifugation and resuspended in Tris buffer (50 mM Tris, 200 mM NaCl, pH 8). Cells were lysed by sonication. The cell lysate was centrifuged to separate the soluble proteins from the insoluble proteins. The insoluble protein pellet was resuspended in Tris buffer with 6M urea and the proteins were subjected to rapid refolding by quickly diluting the solution 1:10 fold in Tris buffer. The protein concentrations of both the soluble proteins and the pelleted samples containing refolded proteins were estimated by UV₂₈₀ (Spectrophotometer DU 800). Supernatants containing STF2.HA1-1(Mal) (SEQ ID NO: 209); STF2.HA1-2(Mal) (SEQ ID NO: 210), STF2.HA1-2(SH, Shanghai) (SEQ ID NO: 211) protein and solubilized pellets containing refolded STF2.HA1-1(Mal), STF2.HA1-2(Mal), STF2.HA1-2(SH) were evaluated by ELISA for reactivity with ferret antisera raised on natural infection against B/Malaysia/2506/2004. E. coli supernatant samples and solubilized, refolded samples containing STF2.4×M2e (SEQ ID NO: 94) protein were used as negative controls.

### ELISA Method

[0459] The ELISA plate (Maxisorp, Nunc, Denmark) was coated with the flagellin-specific monoclonal antibody 6H11 (Inotek, Beverly, Mass.) at 0.5 ug/mL and incubated overnight at 2-5° C. The antibody coating solution was aspirated and the wells were blocked with 300 uL/well Super Block+Tween-20 for 2 hours at 25° C. The plate was washed once with 1×PBS and blot-dried. Three-fold serial dilutions of the different protein solutions were performed in a dilution plate starting with a concentration of 5 ug/mL. 100 uL was transferred from the dilution plate to the ELISA plate.

[0460] The plate was incubated for 1 hr at 25° C. Unbound protein was removed by washing the plate 3 times with PBS+0.05% Tween-20. Ferret antiserum raised against B/Malaysia/2506/2004 (CDC, AL, Georgia) was diluted to 1:100 and 100 uL was added to each well. The plate was then incubated for 1 hr at 25° C. After this incubation step, the plates were washed 6 times with PBS containing 0.05% Tween-20. Goat anti-ferret IgG conjugated to horseradish peroxidase (HRP, Bethyl Labs Inc., IL) was diluted 1:10,000 and 100 uL was added to each well. The plate was incubated for 30 min. After this incubation step, the plate was washed 6 times with PBS+0.05% Tween-20. 100 uL of TMB Ultra containing the HRP substrate 3,3′,5,5′-tetramethylbenzidine (Pierce, Rockford, Ill.) was added to each well. After the addition of this substrate, the color development was monitored and the reaction was stopped with the addition of 100 uL/well 1M H₂SO₄. A₄₅₀ was measured on a microplate reader (SpectraMax 190, Molecular devices, Sunnyvale, Calif.).

Antigenicity of Influenza B HA Proteins Produced in E. coli

[0461] The ELISA data (FIG. 3) indicated that the antisera recognized epitopes that were sensitive to reductant. Treatment of proteins with reducing agents, which alter the conformation of the proteins by the disruption of disulphide bonds and, diminished reactivity of the antisera with the proteins. The reactivity of STF2.HA1-2(Mal) total lysate non-reduced, STF2.HA1-2(SH) total lysate non-reduced and STF2.HA1-1(Mal) total lysate non-reduced when maintained in the properly folded configuration was very good and indicates that the conformation of the individual HA-fusion proteins was comparable to that of the globular head in the native HA protein. While the antiserum contains conformationally sensitive antibodies and the reactivity depends on correct disulfide bonding, it also contains antibodies that are non-sensitive to disulfide bonding as demonstrated by the residual activity which was observed in both reduced and non-reduced conditions.

### TLR5Bioactivity of STF2.HA (Influenza B) Proteins

[0462] The recombinant fusion proteins showed potency which matched the results from the Capture ELISA indicating that refolded samples may be more active than the lysate in its native form (FIGS. 4 and 5). The samples in the native untreated form showed activity which were 2-fold less than the refolded samples. These proteins were misfolded in the native form and therefore require a refolding step to reinstall the TLR-5 bioactivity. This activity was consistent with HA activity in the Capture ELISA.

### Example 5

### Immunogenicity of Recombinant Flagellin-Hemagglutinin Fusion Proteins Representing Viral Strain A/Puerto Rico/8/34 in E. Coli

### Materials and Methods

[0463] Animal studies: Female BALB/c mice (Jackson Laboratory, Bar Harbor, Me.)) were used at the age of 6-8 weeks. Mice were divided into groups of 10 and received inguinal subcutaneous (s.c) immunizations on days 0 and 14 as follows:

1) PBS (phosphate buffered saline).
2) 3 μg of STF2.4×M2e (SEQ ID NO: 94) in saline buffer (10 mM Histidine, 10 mM Tris, 75 mM NaCl, 5% (vol/vol) sucrose, 0.02% (w/v) Polysorbate-80, 0.1 mM EDTA, 0.5% (v/v) ethanol, pH 7.2)

### 3) 30 μg of STF2.HA1-2(PR8) (SEQ ID NO: 90) in PBS

### 4) 3.0 μg of STF2.HA1-2(PR8) (SEQ ID NO: 90) in PBS

### 5) 0.3 μg of STF2.HA1-2(PR8) (SEQ ID NO: 90) in PBS

### 6) 0.03 μg of STF2.HA1-2(PR8) (SEQ ID NO: 90) in PBS

[0464] An additional group of five mice received an experimentally determined sublethal challenge with 8×10¹ egg infectious dosages (EID) PR/8/34 and were allowed to convalesce for >21 days. These animals were then used as immune convalescent positive controls during the challenge studies (see below). Mice were bled on days 10 (primary) and 21 (boost), and sera were clarified by clotting and centrifugation and stored at −20° C.

[0465] Serum antibody determination: HA-specific IgG levels were determined by ELISA. 96-well ELISA plates (Costar (Cat #9018) Corning, N.Y.) were coated overnight at 4° C. with 100 μl/well HA0sHis protein (produced in Drosophila) (SEQ ID NO: 176) in PBS (5 μg/ml). Plates were blocked with 200 μl/well of Assay Diluent Buffer (ADB; BD Pharmingen, (Cat#: 555213) (San Diego, Calif.) for one hour at room temperature. The plates were washed three times in PBS+0.05% (v/v) Tween 20 (PBS-T). Dilutions of the sera in ADB were added (100 μl/well) and the plates were incubated overnight at 4° C. The plates were washed three times with PBS-T. HRP-labeled goat anti-mouse IgG antibodies (Jackson Immunochemical, West Grove, Pa. (Cat#: 115-035-146)) diluted in ADB were added (100 μl/well) and the plates were incubated at room temperature for 1 hour. The plates were washed three times with PBS-T. After adding TMB Ultra substrate (Pierce (Cat 34028), Rockford, Ill.)) and monitoring color development, A₄₅₀ was measured on a Tecan Farcyte (Durham, N.C.) microplate spectrophotometer.

[0466] MDCK whole cell ELISA: MDCK cells (ATCC (Cat# CCL-34) Manassas, Va.) were grown in 96-well culture plates (BD (Cat 353075), Corning, N.Y.) in DMEM complete medium containing 10% FCS at 37° C. for one to two days or until cells were near confluence. Wells were then incubated with 1×10⁶ EID of PR/8/34 virus (50 μl) in DMEM medium without FCS or medium alone (for uninfected controls).

[0467] Following a 60 minute incubation at 37° C., 200 μl of complete medium was added to each well and plates were incubated overnight at 37° C. The next day plates were washed with PBS and fixed with 10% formalin at room temperature for 10 minutes. Wells were washed three times with PBS/0.1% BSA and blocked with 200 μl/well ADB (BD Pharmingen, Cat# 555213), San Diego, Calif.) for one hour at RT or overnight at 4° C. Serial dilutions of test sera were added to the wells and incubated for one to two hours at room temperature. Wells were washed and incubated with HRP-conjugated goat anti-mouse IgG (Jackson Immunochemical, Cat 115-035-146 (West Grove, Pa.) for 30 minutes at room temperature, followed by TMB Ultra substrate (Pierce (Cat# 34028), Rockford, Ill.) for two minutes at room temperature. The reaction was stopped with the addition of 25 μl of 1N H₂SO₄ and the OD₄₅₀ was read using a microplate spectrophotometer (FARCyte, Amersham, Durham, N.C.).

### Results and Discussion

[0468] Induction of HA-specific IgG response following immunization with STF2.HA1-2(PR8) (SEQ ID NO: 90): The immunogenicity of STF2.HA1-2 was examined by immunizing BALB/c mice (10/group) subcutaneously on day 0 and 14 with a dose range of STF2.HA1-2 (30, 3.0, 0.3, or 0.03 μg). Control groups of mice were immunized with PBS (negative control), 3 μg of STF2.4×M2e (SEQ ID NO: 94) (negative control for HA immunogenicity, positive control for lethal challenge efficacy study), or a sub-lethal challenge with 8×10¹ EID of the influenza isolate PR/8/34 to generate immune convalescent animals. HA-specific IgG responses were examined 7 days post boost (Day 21) by ELISA. The results demonstrate that immunization with 30, 3 or 0.3 μg of STF2.HA1-2(PR8) induced consistent and significant HA0sHis-specific (SEQ ID NO: 176) IgG responses in a dose-dependent manner (FIG. 6).

[0469] Sera from BALB/c mice immunized with STF2.HA1-2 (SEQ ID NO: 90) react with MDCK cells infected with influenza virus: The direct ELISA results above demonstrated that the immune sera from STF2.HA1-2-immunized animals recognize recombinant Drosophila expressed HA0sHis (SEQ ID NO: 176) corresponding to the PR/8/34 HA sequence. In order to demonstrate that the anti-HA antibodies recognize native viral HA, the same sera were examined for the ability to react with MDCK cells infected with PR/8/34. The results shown in FIG. 7 demonstrate that sera from mice immunized with 30, 3.0, or 0.30 μg of STF2.HA1-2 bound specifically to PR/8/34-infected MDCK cells, indicating that the anti-HA antibodies elicited by immunization with STF2.HA1-2 recognize HA in its native conformation.

[0470] Collectively these results demonstrate that mice immunized with STF2.HA1-2(PR8) (SEQ ID NO: 90) in PBS, without conventional adjuvant or carrier, mounted vigorous anti-HA responses that recognized recombinant HA expressed in Drosophila and native viral HA expressed on the surface of PR/8/34 infected MDCK cells in vitro.

### Example 6

### Efficacy of Recombinant Flagellin-Hemagglutinin Fusion Proteins Representing Viral Strain A/Puerto Rico/8/34

### Materials and Methods

[0471] Influenza virus challenge of mice. To assess efficacy, mice immunized as described in Example 5 were challenged on day 28 by intranasal administration of an LD₉₀ (dose lethal to 90% of mice) (8×10³ EID) of influenza A isolate PR/8/34. Animals were monitored daily for 21 days following the challenge for survival, weight loss and clinical presentation. The % weight loss was calculated based on the mean of ((Daily weight (g)/Initial weight (g) day 28)×100) of each individual animal per group. Clinical scores were assigned as follows: 4 pts=healthy, 3 pts=reduced grooming, 2 pts=reduced physical activity and 1 pt=moribund. (Experimental results for clinical scores and weight loss reflect the results based on surviving animals on the day evaluated).

[0472] Virus titration and determination of TCID₅₀.

[0473] Cell preparation: MDCK cells (ATCC (Cat# CCL-34), Manassas, Va.) were cultured in 100×20 mm culture plates (BD (Cat# 353003) Corning, N.Y.) to 90-95% confluency and the monolayer was dislodged by incubation with trypsin-EDTA at 37° C./5% CO₂ for 20 minutes. The trypsin was inactivated by the addition of DMEM cell culture medium supplemented with 10% FBS, and the cell monolayer was scraped with a sterile spatula to complete detachment of cells. The cell suspension was harvested and washed twice with DMEM+10% FBS. Cells were resuspended in DMEM+10% FBS and counted. The cell concentration was adjusted to 4×10⁵ cells/ml and 100 μl was added to each well of a 96-well tissue culture plate (BD (Cat# 353075), Corning N.Y.). Plates were incubated at 37° C./5% CO₂ until confluence reached 90-95%.

[0474] Viral titration: Influenza virus (strain A/Puerto Rico/8/34 [PR/8]) was diluted to 1×10⁸ EID in phenol red-free DMEM+0.1% BSA (fractionV (Rockland (Cat#BSA-50) Gilbertsville, Pa.), and serial 5-fold dilutions were prepared in 96-well plates using the same medium. Monolayers of MDCK cells in 96-well plates, prepared as described in herein, were washed by aspirating the culture medium, replacing with 200 μl/well of 1×PBS, and aspirating the PBS. Serial 5-fold dilutions of influenza virus prepared above were added to the washed monolayers in a volume of 100 μl/well. One row of wells was treated with medium only as a control. The cells were incubated for 2 hours at 37° C./5% CO₂ to allow viral attachment and entry. Wells were washed by aspiration, rinsing with 200 μl/well PBS, and aspiration of the PBS. All wells received 100 μl/well phenol red-free DMEM+0.1% BSA and the plates are incubated for 48 hours at 37° C./5% CO₂.

[0475] Determination of cell viability: Following incubation with virus as described above, the medium was aspirated from the wells and replaced with fresh medium containing 40 μg/ml neutral red (Simga Aldrich (Cat# N2889) St. Louis, Mo.). To determine maximum lysis, 2 μl lysis solution (9% Triton X-100 in water, weight/vol) was added to triplicate wells that were incubated with medium only. Following a one hour incubation, the cells were fixed by the addition of 100 μl/well 1% formaldehyde/1% CaCl₂ for 5 minutes at room temperature; this fix step was performed twice in succession. The fix solution was aspirated and the neutral red was released by the addition of 100 μl/well of extraction medium (50% ethanol/1% acetic acid).

[0476] The plate was incubated at room temperature for 20 minutes, with shaking for the final 2 minutes. The amount of dye released was determined by measuring absorbance at a wavelength of 540 nm using a microplate spectrophotometer. Cell death (and hence, viral infectivity) was measured as a decrease in the amount of dye released as compared to media control. At the end of the incubation, the neutral red assay was performed as described herein. The percentage lysis of each serum dilution was calculated as:

% reduction=100×((sample−virus)/(med−virus))

[0477] where sample, max, and med refer to the absorbance values in wells representing experimental samples, virus only, and medium only, respectively. The neutralizing titer of each sample was defined as the dilution of serum which resulted in a 50% reduction in viral infectivity.

[0478] Influenza A/PR/8/34 Neutralization Assay This assay was adapted with modifications from WHO Manual on Animal Influenza Diagnosis and Surveillance, p. 86-88 (WHO/CDS/CSR/NCS2002.5). The Neutral Red Assay is adapted from a public protocol of the Cell Lab at Gettysburg College (http://www3.gettysburg.edu/˜sorense/Cellab04/neutralred.htm)

[0479] Specifically, MDCK (ATCC, Cat#(CCL_{—}34), Manassas, Va.) cells were plated in 96-well tissue culture plates (BD (Cat 353075), Corning, N.Y.) as described above. Test reagents (experimental and control sera) were heat-inactivated by incubating for 30 minutes in a water bath heated to 56° C. Sera were serially titrated in 96-well plates, in 3-fold dilutions in phenol red-free DMEM+0.1% BSA. An equal volume of PR/8/34 virus diluted to 5×10⁶/ml EID in the same medium was added to each serum dilution to achieve a final viral concentration of 2.5×10⁶ EID/ml (The pre-determined TCID₅₀ for our current stock of virus). Wells containing medium only and virus only were included as negative and positive controls, respectively. The plates were incubated for 30 minutes at 37° C./5% CO₂.

[0480] Cell monolayers prepared as described above (Cell preparation) were washed once with 200 μl/well 1×PBS, then 100 μl/well of serum:virus mixtures and control reagents prepared as described above were added and incubated for 2 hours at 37° C./5% CO₂. Following incubation, cell monolayers were washed once with PBS, and 100 μl/well phenol red-free DMEM+0.1% BSA was added to each well and incubated at 37° C./5% CO₂ for 48 hours. At the end of the incubation, the neutral red assay was performed as described above (Determination of cell viability). The percentage lysis of each serum dilution was calculated as described above. The neutralizing titer of each sample was defined as the dilution of serum which results in a 50% reduction in viral infectivity

### Results and Discussion

[0481] Immunization with STF2.HA1-2(PR8) (SEQ ID NO: 90) provides protection from a lethal challenge with influenza A: The results from Example 5 demonstrated that immunization of mice with STF2.HA1-2(PR8) (SEQ ID NO: 90) generated an antibody response that recognized native HA. In order to evaluate efficacy, the same mice were challenged on day 28 with an LD₉₀ (8×10³EID) of PR/8/34 virus administered intra-nasally. Mice were monitored daily for 19 days following the challenge for survival, weight loss and clinical presentation. As shown in FIGS. 8A, 8B, and 8C, PBS-immunized mice showed signs of infection (weight loss and lower clinical scores) as early as three days post-challenge and all mice died by day 21 post-challenge. In contrast, mice immunized with 30, 3.0 or 0.3 μg of STF2.HA1-2(PR8) (SEQ ID NO: 90) demonstrated markedly enhanced protection. These animals demonstrated little to no weight loss, significantly higher clinical scores and 100% survival that was similar to immune convalescent control animals over the 21 day period. These results demonstrate that E. coli-expressed STF2.HA1-2(PR8) (SEQ ID NO: 90) induces HA-specific immune responses that successfully protect BALB/c mice from a lethal challenge with virulent influenza A virus in vivo.

[0482] In order to evaluate the effectiveness of the antibody response in vitro a cell-based virus neutralization assay was developed to test the ability of immune sera to neutralize viral infectivity. In this study the viral inhibitory activity of serum from animals immunized with STF2.HA1-2(PR8) (SEQ ID NO: 90) and STF2.HA1-1(PR8) (SEQ ID NO: 151) was examined. Serial dilutions of non-immune and immune sera were pre-incubated with PR/8 and incubated with MDCK cells. Wells were washed to remove free virus and plates were incubated prior to staining with neutral red to detect live cells. The results indicate that immune sera from animals immunized with STF2.HA1-2(PR8) (SEQ ID NO: 90) demonstrated a tissue culture inhibition 50% dose (TCID) of >1:40 (FIG. 9).

### Example 7

### Immunogenicity of Recombinant Flagellin-Hemagglutinin Fusion Proteins Representing Viral Strain A/Viet Nam/1203/2004

### Materials and Methods

[0483] Animal studies: Female BALB/c mice (Jackson Laboratory, Bar Harbor, Me.) were used at the age of 6-8 weeks. Mice were divided into groups of 10 and received inguinal s.c immunizations on days 0 and 14 as follows:

[0484] 1) PBS (phosphate buffered saline).

[0485] 2) 3.0 μg of STF2.HA1-2(PR8) (SEQ ID NO: 90) in PBS

[0486] 3) 3.0 μg of STF2.HA1-2(VN) (SEQ ID NO: 95) in PBS

[0487] 4) 0.3 μg of STF2.HA1-2(VN) (SEQ ID NO: 95) in PBS

[0488] Mice were bled on day 21 and sera were clarified by clotting and centrifugation and stored at −20° C.

[0489] Serum antibody determination: HA and STF2-specific IgG levels were determined by ELISA. 96-well ELISA plates (Costar (Cat#9018), Corning, N.Y.) were coated overnight at 4° C. with 100 μl/well of HA protein purified from Viet Nam/1203/2004 (BEI Resources (Cat #NR-660), Manassas, Va.)) or recombinant flagellin (STF2) (SEQ ID NO: 96) in PBS (5 μg/ml). Plates were blocked with 200 μl/well of Assay Diluent Buffer (ADB; BD Pharmingen (Cat#555213) San Diego, Calif.) for one hour at room temperature. The plates were washed three times in PBS buffer containing 0.05% (v/v) Tween 20 (PBS-T). Dilutions of the sera in ADB were added (100 μl/well) and the plates were incubated overnight at 4° C. The plates were washed three times with PBS-T. HRP-labeled goat anti-mouse IgG antibodies (Jackson Immunochemical (Cat#115-035-146), West Grove, Pa.) diluted in ADB were added (100 μl/well) and the plates were incubated at room temperature for 1 hour. The plates were washed three times with PBS-T. After adding TMB Ultra substrate (Pierce (Cat#34028), Rockford, Ill.)) and monitoring color development, A₄₅₀ was measured on a Tecan Farcyte (Durham, N.C.) microplate spectrophotometer.

### Results and Discussion

[0490] The immunogenicity of STF2.HA1-2(VN) (SEQ ID NO: 95) was examined in BALB/c mice. Animals were immunized s.c. on days 0 and 14 with 3 μg STF2.HA1-2(PR8) (SEQ ID NO: 90), or 3 or 0.3 μg of STF2.HA1-2(VN) (SEQ ID NO: 95). On day 21 animals were bled and serum IgG responses to purified HA from A/Viet Nam/1203/2004 (obtained from BEI Resousrces Cat# NR-660) and recombinant flagellin (STF2; (SEQ ID NO: 96)) were examined by ELISA (FIGS. 10A and 10B). The results demonstrate that serum from mice immunized with STF2.HA1-2(VN) (SEQ ID NO: 95) exhibit antigen-specific reactivity with purified H5 protein from influenza A/Viet Nam/1203/2004.

### Example 8

### Cloning, Expression, and Biochemical Characterization of Recombinant Flagellin-Hemagglutinin Fusion Proteins Produced in Baculovirus

[0491] Cloning: Expression of HA and STF2.HA fusion proteins was carried out using the Bac-to-Bac Baculovirus Expression System (Invitrogen, Carlsbad, Calif.) according to the manufacturer's guidelines (FIG. 11). cDNAs encoding HA and STF2.HA fusion proteins were cloned into the pFastBac donor plasmid which was then used to transform DH10Bac cells containing the bacmid and helper DNA. Recombinant bacmid clones generated by homologous recombination in DH10Bac were then identified by blue-white screening on X-gal plates. The details of the cloning procedure are given in the following paragraphs.

[0492] Generation of vector cassettes: The pFastBac™1 vector is compatible with the Bac-to-Bac® Baculovirus Expression System (Invitrogen, Carlsbad, Calif.). This vector has a strong AcMNPV polyhedrin (PH) promoter for high level protein expression and a large multiple cloning site for simplified cloning. pFastBac™1 is a non-fusion vector (i.e. no fusion tags are present in the vector).

[0493] To ensure proper expression of recombinant protein, the insert must contain an ATG start codon for initiation of translation and a stop codon for termination of translation. In order to facilitate cloning of flagellin in fusion with several truncations of the HA gene, two plasmid cassettes were engineered: pFB-STF2Blp.wt (SEQ ID NO: 97) and pFB-STF2Blp.ng (SEQ ID NO: 98). In the latter, the putative glycosylation sites in the flagellin (STF2) gene were obliterated by substituting Gln (Q) for Asn (N). Potential glycosylation sites were determined using the consensus sequence for N-glycosylation N-X-S/T: N residue followed by any residue by S or T in the third position.

[0494] In the certain locations, residues 40, 122, 215, 237, 414, 478, and 497 of the STF2 gene (SEQ ID NO: 212) the N residue was incorporated as a Q substitution. Constructs which harbor these mutations and in which the proteins are not likely to be modified by sugars are designated as non-glycosylated (ng) mutants. Similarly, glycosylation mutations were introduced in HA0s gene at positions 11, 23, 268, 286 and 480 (SEQ ID NO: 23). Both vector constructs (pFB-STF2Blp.wt and pFB-STF2Blp.ng) harbor a silent mutation at nucleotides 5′-GTGCTGAGCCTGTTACGT-3′ (SEQ ID NO: 310) (nt 1501 to 1518) of STF2 (SEQ ID NO: 212) creating a unique BlpI in the plasmid cassette. Each cassette contains the honey bee melittin (HBM) sequence (SEQ ID NO: 99) fused at the amino terminus of STF2 to provide a signal for secretion. Both plasmids were codon-optimized for expression in BBaculovirus (Midland Certified Reagent Co., Inc, Midland, Tex.; DNA2.0 Inc, Menlo Park, Calif.). The synthetic genes were excised with BamHI or BglII and SphI and cloned into pFastBac™1 vector by compatible end ligation generating the pFB-STF2Blp.wt and pFB-STF2Blp.ng cassettes.

[0495] Flagellin-HA fusion constructs: Subunits of the HA globular head from influenza strains A/Puerto Rico/8/34, A/Viet Nam/1203/2004, A/Indonesia/2005 and A/New Calcdonia/12/99 were expressed alone or genetically fused to flagellin (STF2) (SEQ ID NO: 178) and expressed in Baculovirus. This was accomplished by one of three methods.

[0496] Method #1: To generate reagents for ELISA, HA1-1 subunits of PR8, VN, IND and NC strains (Tables 7 and 8) were cloned into pFASTBac™1, generating pFB.HA1-1 that harbors a hexa-his tag. This was achieved by employing PCR with a set of primers as indicated in the Tables below and with a synthetic codon-optimized HA0s gene (HA excluding the signal sequence and extracellular domain) as DNA template (DNA2.0 Inc., Menlo Park, Calif.). The PCR fragments were digested with BglII and SphI and inserted into pFastBac™1 that has previously been treated with BglII and SphI enzymes followed by BAP treatment. In order to generate a flagellin-HA subunit fusion, the PCR product was digested with BlpI, and ligated by compatible ends to pFB-STF2Blp.wt.

[0497] Method #2: In this protocol, codon-optimized HA subunit genes representing both the wt and non-glycosylated forms were chemically synthesized (DNA2.0 Inc., Menlo Park, Calif.). The genes were excised with BlpI and SphI enzymes and the fragment gel purified and ligated to pFB-STF2Blp.wt or the non-glycosylated version, pFB-STF2Blp.ng previously digested with BlpI and SphI and BAP treated. In each case, the ligation mix was used to transform TOP10 cells and transformants were screened by PCR and DNA sequencing to confirm the presence and correct orientation of the inserts. The constructs were used to transform MAX Efficiency® DH10Bac™ competent E. coli (Invitrogen, Carlsbad, Calif.) to generate a recombinant bacmid. The colonies of bacteria were screened for positive bacmids by blue/white selection on plates containing 50 μg/mL kanamycin, 7 μg/mL gentamycin, 10 μg/mL tetracycline, 40 μg/mL IPTG and Bluo-Gal (40 μg/mL). Recombinant bacmid DNA was prepared and used to transfect the insect cell line of choice (Sf9 or Sf21 cells) to generate a recombinant Baculovirus. The baculoviral stock was then amplified and titered and used to infect High Five insect cells to express the recombinant protein.

TABLE 7
PR8 HA constructs for expression in Baculovirus

| | | | FOR Primer | REV Primer | DNA Template |
|---|---|---|---|---|---|
| SEQ ID NO: | Construct (His tag) | Method | SEQ ID NO: | SEQ ID NO: | SEQ ID NO: |
| 100 | STF2.HA0s | #1 | 101 | 102 | 103 |
| 104 | STF2.HA1-1 | #1 | 105 | 106 | 103 |
| 107 | STF2.HA1-2 | #1 | 108 | 109 | 103 |
| 110 | STF2.HA1-2mut | #2 | N/A | N/A | 111 |
| 112 | STF2.HA1-3 | #1 | 113 | 114 | 103 |
| 115 | STF2.HA1-3mut | #2 | N/A | N/A | 116 |
| 117 | ngSTF2.HA0s | #2 | N/A | N/A | 118 |
| 119 | ngSTF2.HA1-1 | #2 | N/A | N/A | 120 |
| 121 | ngSTF2.HA1-2 | #2 | N/A | N/A | 122 |
| 123 | ngSTF2.HA1-2mut | #2 | N/A | N/A | 124 |
| 125 | ngSTF2.HA1-3 | #2 | N/A | N/A | 126 |
| 127 | ngSTF2.HA1-3mut | #2 | N/A | N/A | 128 |
| 129 | wtSTF2.HA1-1ng | #2 | N/A | N/A | 130 |
| 131 | ngSTF2.HA1-1wt | #2 | N/A | N/A | 132 |
| 133 | HA1-1 | #1 | 134 | 135 | 136 |
| 137 | HA1-1 (no tag) | #1 | 134 | 138 | 136 |

TABLE 8
NC, VN and NC HA constructs for expression in Baculovirus

| SEQ | | | | | DNA |
|---|---|---|---|---|---|
| ID | Construct | | FOR Primer | REV Primer | Temlate |
| NO: | (his tag) | Method | SEQ ID NO: | SEQ ID NO: | SEQ ID NO: |
| 139 | HA1-1(NC) | #1 | 140 | 141 | 142 |
| 143 | HA1-1(VN) | #1 | 144 | 145 | 146 |
| 147 | HA1-1(IND) | #1 | 148 | 149 | 150 |

[0498] Protein Expression: Spodoptera frugiperda (Sf9) insect cells were cultured in Grace's Insect Cell Medium (Invitrogen; Carlsbad, Calif.). Recombinant bacmids were purified from DH10Bac clones and transfected into Sf9 cells using Cellfectin (Invitrogen; Carlsbad, Calif.) to generate passage one (P1) Baculovirus stocks which were then titered by traditional plaque assay according to the manufacturer's guidelines. Subsequent infections of Sf9 cells were performed using P1 viral stocks at a multiplicity of infection (MOI) of 0.1 to produce larger volume P2 viral stocks with increased viral titers. Cultures expressing the following proteins were scaled up for protein purification: ngSTF2.HA(PR8)1-2mutHis (SEQ ID NO: 156); ngSTF2.HA(PR8)1-1H is (SEQ ID NO: 152; STF2.HA(PR8)1-1His (SEQ ID NO: 151); STF2.HA(PR8)1-2His (SEQ ID NO: 153); STF2.HA1-2mutHis (SEQ ID NO: 155); HA(PR8)1-1His (SEQ ID NO: 179) HA(VN)1-1His (SEQ ID NO: 180); HA(IND)1-1His (SEQ ID NO: 181); HA(NC)1-1His (SEQ ID NO: 182). Protein expression was performed by infecting 2×1 L flasks of High-5 insect cells with P2 virus at an MOI of 2 and culturing for 24 hrs at 28° C. with slow shaking Conditioned medium was harvested by centrifugation and clarified by passing through a 0.22 μm filter and stored at 4° C.

[0499] Protein Purification: NiSO₄ was added to each clarified supernatant to a final concentration of 0.5 mM and the pH adjusted to 8.0. The His₆-tagged protein was then captured on a chelating sepharose column (GE/Amersham Biosciences; Piscataway, N.J.) charged with NiSO₄ and equilibrated in Buffer A (20 mM Tris, pH 8.0, 0.5 M NaCl). After washing with Buffer A the bound protein was eluted with Buffer B (Buffer A+0.5 M imidazole). Peak fractions were pooled, dialyzed overnight into Buffer A and applied to a nickel NTA column (Sigma-Aldrich; St. Louis, Mo.). The column was eluted with a 5-column volume gradient from 100% Buffer A to 100% Buffer B. Peak fractions were pooled and dialyzed into 1×TBS, pH 8.0.

[0500] SDS-PAGE and western blot analysis: Protein identity was determined, and purity estimated, by SDS-PAGE. An aliquot of 5 μg of each sample was diluted in SDS-PAGE sample buffer with or without 100 mM DTT as a reductant. The samples were boiled for 5 minutes and loaded onto a 10% SDS polyacrylamide gel (LifeGels; French's Forrest, New South Wales, AUS) and electrophoresed. The gel was stained with Coomassie R-250 (Bio-Rad; Hercules, Calif.) to visualize protein bands. For western blot, 0.5 μg/lane total protein was electrophoresed as described above and the gels were then electro-transfered to a PVDF membrane and blocked with 5% (w/v) dry milk before probing with anti-flagellin antibody (Inotek; Beverly, Mass.), anti-His₆ antibody (Invitrogen; Carlsbad, Calif.), or influenza A PR/8/34 convalescent immune serum (described below under Protein Antigenicity ELISA). After probing with alkaline phosophatase-conjugated secondary antibodies (Pierce; Rockford, Ill.), protein bands were visualized with an alkaline phosphatase chromogenic substrate (Promega; Madison, Wis.).

[0501] Protein assay: Total protein concentration was determined using the Micro BCA (bicinchoninic acid) Assay (Pierce; Rockford, Ill.) in the microplate format, using bovine serum albumin as a standard, according to the manufacturer's instructions.

[0502] Endotoxin assay: Endotoxin levels were determined using the QCL-1000 Quantitative Chromogenic LAL test kit (Cambrex; E. Rutherford, N.J.), following the manufacturer's instructions for the microplate method.

[0503] TLR5 bioactivity assay: HEK293 cells constitutively express TLR5, and secrete several soluble factors, including IL-8, in response to TLR5 signaling. Cells were seeded in 96-well microplates (50,000 cells/well), and the following test proteins were added and incubated overnight: ngSTF2.HA(PR8)1-2mutHis (SEQ ID NO: 156); ngSTF2.HA(PR8)1-1His (SEQ ID NO: 152); STF2.HA(PR8)1-1His (SEQ ID NO: 151); STF2.HA(PR8)1-2His (SEQ ID NO: 153); STF2.HA1-2(PR8)mutHis (SEQ ID NO: 155) The next day, the conditioned medium was harvested, transferred to a clean 96-well microplate, and frozen at −20° C. After thawing, the conditioned medium was assayed for the presence of IL-8 in a sandwich ELISA using an anti-human IL-8 matched antibody pair (Pierce; Rockford, Ill., #M801E and #M802B) following the manufacturer's instructions.

[0504] Protein antigenicity ELISA: The following constructs purified from Baculovirus culture were evaluated by ELISA to determine whether the proteins displayed correctly folded epitopes of HA: ngSTF2.HA(PR8)1-2mutHis (SEQ ID NO: 156); ngSTF2.HA(PR8)1-1His (SEQ ID NO: 152); STF2.HA(PR8)1-1His (SEQ ID NO: 151); STF2.HA(PR8)1-2His (SEQ ID NO: 153); STF2.HA1-2mutHis (SEQ ID NO: 155); and HA(PR8)1-1His (SEQ ID NO: 179). 96-well ELISA plates were coated overnight at 4° C. with serial dilutions in PBS (100 μl/well) of each target protein starting at 5 μg/ml. Plates were blocked with 200 μl/well of Assay Diluent Buffer (ADB; BD Pharmingen) for one hour at room temperature, then washed three times in PBS-T. A fixed dose of primary antibody was then added to each well. To assay HA reactivity, 100 μl/well of a 1:10,000 dilution of non-immune or PR/8/34 convalescent immune serum in ADB was added. PR/8/34 immune serum was generated in BALB/c mice (Jackson Laboratory, Bar Harbor, Me.) that received an experimentally determined sublethal challenge dose of 8×10¹ egg infectious dosages (EID) of PR/8/34 influenza virus. Animals were then allowed to convalesce for >21 days post-infection at which time immune serum was isolated and clarified.

[0505] For ELISA of flagellin or the 6× histidine tag, monoclonal antibody against 6×His (Invitrogen; Carlsbad, Calif.), or flagellin (Inotek; Beverly, Mass.) was added at 1 μg/ml in ADB (100 μl/well) and the plates were incubated for 1 hr at room temperature or overnight at 4° C. The plates were then washed three times with PBS-T. HRP-labeled goat anti-mouse IgG antibodies (Jackson Immunochemical; West Grove, Pa.) diluted in ADB were added (100 μl/well) and the plates were incubated at room temperature for 1 hour. The plates were washed three times with PBS-T. After adding TMB Ultra substrate (Pierce; Rockford, Ill.) and monitoring color development, A₄₅₀ was measured on a microplate spectrophotometer (FARCyte, GE/Amersham; Piscataway, N.J.).

### Results and Discussion

[0506] Expression and purification of recombinant HA proteins: The results of Baculovirus expression of recombinant STF2.HA fusion proteins are summarized in Table 9. All proteins were expressed in moderate to high yield. Purity after metal chelate chromatography was generally good and endotoxin levels were far below the acceptable limit of 0.1 EU/μg. All STF2 fusion proteins demonstrated potent in vitro TLR5 activity.

TABLE 9

| | | | | | TLR |
|---|---|---|---|---|---|
| | SEQ | | | | activity |
| | ID | Yield | Purity | Endotoxin | (EC₅₀, |
| Protein | NO: | (mg) | est. (%) | (EU/μg) | ng/ml) |
| STF2.HA1-1His(PR8) | 151 | 12 | >80 | 0.01 | 3 |
| ngSTF2.HA1-1His(PR8) | 152 | 24 | >90 | <0.01 | 30 |
| STF2.HA1-2His(PR8) | 153 | 13.2 | >90 | <0.01 | 9 |
| STF2.HA1-2mutHis(PR8) | 155 | 25 | >95 | <0.01 | 900 |
| ngSTF2.HA1- | 156 | 6 | >90 | 0.01 | 9 |
| 2mutHis(PR8) | | | | | |

[0507] STF2.HA proteins for Baculovirus expression were engineered with and without N-linked glycosylation sites in order to determine the effect of this posttranslational modification on protein expression, folding, and biological activity. ngSTF2.HA1-2.mutHis(PR8) (SEQ ID NO: 156), which is non-glycosylated, appears to be expressed at a lower level in Baculovirus supernatants than the corresponding glycosylated protein, suggesting that glycosylation may influence the folding or secretion of this protein. However, the glycosylated and non-glycosylated versions of this protein appear to react equally with convalescent antiserum from influenza PR8-infected mice when analyzed by western blot. Furthermore, ngSTF2.HA1-1H is(PR8) (SEQ ID NO: 152) expressed at higher levels than its glycosylated counterpart, indicating that any effect of glycosylation on expression of these proteins may not be easily generalized.

[0508] In addition to the proteins expressed and purified at large scale, small-scale Baculovirus P1 supernatants of STF2.HA1-3H is(PR8) (SEQ ID NO: 157) and STF2.HA1-3mutHis(PR8) (SEQ ID NO: 158) were analyzed for HA antibody reactivity. As seen with the STF2.HA1-3(PR8) protein (SEQ ID NO: 92) expressed in E. coli (See Example #4), these proteins showed very poor reactivity with PR8 convalescent mouse serum on western blots of conditioned medium. This result further confirms that STF2.HA1-3 proteins, whether expressed in a prokaryotic or eukaryotic host, are unable to fold properly and display native epitopes.

[0509] Antigenicity: Several STF2.HA proteins produced in Baculovirus and E. coli were analyzed by ELISA. All STF2 fusion proteins reacted equally well with anti-flagellin antibody (Inotek; Beverly, Mass.), demonstrating equal protein loading in the assay. Proper folding and display of antibody epitopes in STF2.HA fusion proteins was then examined by measuring reactivity of each protein with antisera from mice which had recovered from PR/8/34 influenza infection. Reactivity with PR/8/34 convalescent mouse serum was equivalent for Baculovirus-expressed STF2.HA1-1H is(PR8) (SEQ ID NO: 151), ngSTF2.HA1-1H is(PR8) (SEQ ID NO: 152), and ngSTF2HA1-2mutHis(PR8) (SEQ ID NO: 156), and E. coli-expressed STF2.HA1-2(PR8) (SEQ ID NO: 90) (see Example #4). Thus, serum antibody recognition of the HA head domain may be focused on a region encompassed by the HA1-2 construct. Further, in vitro refolding of STF2.HA1-2 (SEQ ID NO: 90) produced in E. coli results in a protein with equivalent immune reactivity (and therefore similar folded conformation) to a protein processed and secreted from a eukaryotic host (Baculovirus). In addition, serum antibody recognition of the HA head domain may not appear to be dependent on glycosylation and, at least for PR/8/34 HA, may not be negatively affected by glycosylation. HAs (hemaglutinins) from different influenza strains have variable patterns of N-linked glycosylation. (glycosylation may negatively affect immune recognition of other HAs. Serum antibody recognition of HA may be unaffected by N-glycosylation. It is possible glycosylation may otherwise influence the effectiveness, such as the half-life of a vaccine.

### Example 9

### Immunogenicity and Efficacy of Recombinant Flagellin-Hemagglutinin Fusion Proteins Produced in Baculovirus

### Material and Methods

[0510] Animal studies: Female BALB/c mice (Jackson Laboratory, bar Harbor, Me.) were used at the age of 6-8 weeks. Mice were divided into groups of 10 and received inguinal subcutaneous immunizations on days 0 and 14 as follows:

1) PBS (phosphate buffered saline).
2) 3 μg of STF2.HA1-2(PR8) E. coli (SEQ ID NO: 90) in PBS

### 3) 3 μg of STF2.HA1-1(PR8) Baculovirus (SEQ ID NO: 151) in PBS

[0511] 4) 3 μg of ngSTF2.HA1-1(PR8) Baculovirus (SEQ ID NO: 152) in PBS
5) 0.3 μg of ngSTF2.HA1-1(PR8) Baculovirus (SEQ ID NO: 152) in PBS
6) 3 μg of STF2.HA1-1(PR8) E. coli (SEQ ID NO: 89) in PBS
7) 0.3 μg of STF2.HA1-1(PR8) E. coli (SEQ ID NO: 89) in PBS

[0512] Mice were bled on days 10 (primary) and 21 (boost), and sera were clarified by clotting and centrifugation and stored at −20° C. Immunized animals were challenged on day 28 with an LD₉₀ (8×10³ EID) of PR/8/34 virus administered intranasally (See Example 6). Mice were monitored daily for 21 days following the challenge for survival, weight loss and clinical presentation.

[0513] Serum antibody determination: HA-specific IgG levels were determined by ELISA. 96-well ELISA plates (Costar (Cat#9018), Corning, N.Y.) were coated overnight at 4° C. with 100 μl/well HA0sHis protein produced in Drosophila (SEQ ID NO 176) in PBS (5 μg/ml). Plates were blocked with 200 μl/well of Assay Diluent Buffer (ADB; BD Pharmingen (Cat# 555213), San Diego, Calif.) for one hour at room temperature. The plates were washed three times in PBS containing 0.05% Tween-20 (PBS-T). Dilutions of the sera in ADB were added (100 μl/well) and the plates were incubated overnight at 4° C. The plates were washed three times with PBS-T. HRP-labeled goat anti-mouse IgG antibodies (Jackson Immunochemical (Cat# 115-035-146)) diluted in ADB were added (100 μl/well) and the plates were incubated at room temperature for 1 hour. The plates were washed three times with PBS-T. After adding TMB Ultra substrate (Pierce (Cat# 34028), Rockford, Pa.) and monitoring color development, A₄₅₀ was measured on a Tecan Farcyte (Durham, N.C.) microplate spectrophotometer.

### Results and Discussion

[0514] Immunogenicity and efficacy of STF2.HA1-1(PR8) expressed in E. coli and Baculovirus: BALB/c mice were immunized s.c. with 3.0 or 0.3 μg of indicated recombinant fusion proteins on days 0 and 14. On day 21 mice were bled and HA-specific IgG titers were examined by ELISA against HA0sHis (SEQ ID NO 176) expressed in Drosophila. FIGS. 12A, 12B shows the proteins induced varying levels of HA-specific IgG with ngSTF2.HA1-1(PR8) (SEQ ID NO: 152) inducing the strongest response similar to that observed in animals immunized with STF2.HA1-2(PR8) expressed in E. coli (SEQ ID NO: 90). Interestingly, animals immunized with STF2.HA1-1(PR8) containing the intact glycosylation sequences expressed in Baculovirus (SEQ ID NO: 151) elicited little to no detectable antibody responses to HA or flagellin, in marked contrast to that observed in animals similarly immunized with STF2.HA1-1(PR8) where the consensus glycosylation sequences had been removed (SEQ ID NO: 152).

[0515] The immunized mice were challenged on day 28 with an LD₉₀ (8×10³ EID) of PR/8/34 virus administered intranasally. Mice were monitored daily for 21 days following the challenge for survival, weight loss and clinical presentation. As shown in FIGS. 13A, 13B, 13C, PBS-immunized mice showed signs of infection (weight loss and lower clinical scores) as early as three days after challenge and died by day 21, while mice immunized with 3.0 μg of recombinant STF2.HA1-2(PR8) (SEQ ID NO: 90) fusion protein demonstrated enhanced protection with little to no observable clinical signs of infection or weight loss. Although animals immunized with STF2.HA1-1 fusion proteins demonstrated significantly higher efficacy than animals immunized with PBS alone, these animals demonstrated lower efficacy in terms of survival, clinical scores and overall weight loss, compared to animals receiving STF2.HA1-2(PR8) (SEQ ID NO: 90). These results demonstrate that HA subunits linked to STF2 in Baculovirus are immunogenic and efficacious, and suggest that STF2.HA1-1 (SEQ ID NO: 89) expressed in E. coli or Baculovirus is less immunogenic and efficacious than STF2.HA1-2 expressed in E. coli (SEQ ID NO: 90) or Baculovirus.

### Example 10

### Purification of STF2.HA1-2 (IND) (SEQ ID NO: 159)

### Materials and Methods

[0516] Cell banking: E coli cells engineered to express STF2.HA1-2(IND) (SEQ ID NO: 159) were adapted to culture in proprietary MRSF media, banked as glycerol stocks in 1 mL aliquots, and stored at −70° C.

MRSF media, pH 7.0

| Composition | g/L | |
|---|---|---|
| Glucose | 10 | |
| KH₂PO₄ | 7.8 | |
| (NH₄)₂SO4 | 2.33 | |
| Citric Acid | 1.0 | |
| MgSO₄(7H₂0) | 1.0 | |
| CaCl₂ | 0.04 | |
| Trace Metals | 1 | ml |
| Thiamine HCl | 0.01 | |
| Kanamycin | 0.0075 | |

### Trace Metal Solution 1000×

| Component | g/L | |
|---|---|---|
| EDTA, disodium | 5 | |
| FeSO₄(7H₂O) | 10 | |
| ZnSO₄(7H₂O) | 2 | |
| MnSO₄(H₂O) | 2 | |
| CoCl₂(6H₂O) | 0.2 | |
| CuSO₄(5H₂O) | 0.1 | |
| Na₂MoO₄(2H₂O) | 0.2 | |
| H₃BO₃ | 0.1 | |
| H₂O | 1000 | ml |

[0518] Cell scale-up: Two vials (2 ml, banked in MRSF media) of E. coli cells engineered to express STF2.HA1-2 (IND) (SEQ ID NO: 159) were retrieved from −70° C. and inoculated into 500 ml of MRSF medium. The cells were expanded by incubation at 37° C. for 11.5 hours, at which time the OD₆₀₀ was 3.2. The cell scale up provided biomass to inoculate the production bioreactor used in the fermentation.

[0519] Fermentation: A 250 mL aliquot of scaled up cells was used to inoculate a 12 L working volume bioreactor containing 10 L of proprietary MRBR media. The culture was incubated with constant stirring while maintaining pH at 7.0±0.1, temperature at 30±0.1° C., and dissolved oxygen (D0) at no less than 30%, and was run in batch mode until the glucose was exhausted. Glucose exhaustion is indicated by a sudden decrease in O₂ demand, and confirmed by measurement of glucose concentration on a YSI 2700 Select glucose meter. The OD₆₀₀ for the culture at this time was 20.1 AU.

[0520] Thirty minutes after glucose exhaustion, proprietary feed media was pumped into the bioreactor at a controlled rate until 2 L of feed was added. The incubation continued for 5.5 hours under glucose-limiting conditions. At an OD₆₀₀ of 34 AU, protein expression in the culture was induced by the addition of IPTG to a final concentration of 2 mM and incubation with constant stirring for 2 hours. At the conclusion of the induction period, cells were harvested by centrifugation in an Avanti JP-20 XP centrifuge for 20 minutes at 10,000 g. The final OD₆₀₀ for the culture was 58 AU and the total protein concentration as determined by BCA was 6.73 mg/mL. 1.16 kg of cell paste was recovered from 10.8 L harvest and frozen at −20° C. The total bioreactor run time was 17 hours. STF2.HA1-2 (IND) (SEQ ID NO: 159) production was confirmed by SDS PAGE.

### MRBR Media, pH 7.0

| Composition | g/L |
|---|---|
| Glucose | 20 |
| KH₂PO₄ | 2.2 |
| (NH₄)₂SO₄ | 4.5 |
| Citric Acid | 1.0 |
| MgSO₄(7H₂0) | 1.0 |
| CaCl₂ | 0.04 |
| Trace Metals | 1 ml |
| Thiamine HCl | 0.01 |
| Antifoam | 0.05 |
| Kanamycin | 0.0075 |

### Feed Media, pH 6.0—Additions to MRBR Media (2 L Final Volume)

| Composition | g/L |
|---|---|
| Glucose | 160 |
| KH₂PO₄ | 5.6 |
| DL-Alanine | 50.0 |
| Citric Acid | 3.0 |
| MgSO₄(7H₂0) | 1.0 (added as 78 g/L solution) |
| CaCl₂ | 2.5 (added as 80 g/L solution) |
| Trace Metals | 24 ml |
| FeSO₄ 7H₂O | 0.75 |

[0523] Cell disruption and clarification: The cell paste was thawed and resuspended into a 15% suspension of 50 mM Tris, 25 mM NaCl, pH 8. The slurry was homogenized in an APV1000 homogenizer three times at 12,000 psi. The lysate was adjusted to pH 4.0 by the addition of acetic acid and centrifuged to separate soluble from insoluble material. STF2.HA1-2 (IND) (SEQ ID NO: 159) along with most other proteins partition to the insoluble fraction. The soluble material was discarded and the insoluble material (pellet) was dissolved in two times the initial lysate volume of 50 mM acetate, 1% TritonX-100, 8 M Urea, pH 4. After mixing in the homogenizer at 0 psi, the sample was centrifuged and the supernatant was collected, filtered, and stored at 4° C. The presence of STF2.HA1-2 (IND) (SEQ ID NO: 159) in the proper phases (precipitate or supernatant) was confirmed by SDS PAGE.

[0524] Cation exchange chromatography (CEX): The clarified material was applied to a 50 ml Poros 50HS column. This step was designed to reduce the endotoxin concentration, reduce the nucleic acid concentration and increase the STF2.HA1-2 (IND) (SEQ ID NO: 159) purity of the eluate as compare to the load. After loading, the column was washed with five column volumes of 50 mM acetate, 1% Triton X-100, 8 M Urea, pH 4 followed by 10 column volumes of 50 mM acetate, 8 M Urea, pH 4. The protein was eluted in a 0-100% gradient to 1 M NaCl. The target protein eluted at approximately 300 mM NaCl. The major peak (eluate) was pooled and stored at 4° C. The presence of STF2.HA1-2 (IND) (SEQ ID NO: 159) in the elution was confirmed by SDS PAGE. STF2.HA1-2 (IND) (SEQ ID NO: 159) purification across this step was determined by comparing the number and intensity of protein bands in the load material to those in the elution.

[0525] Endotoxin removal in cation exchange chromatography (CEX): Endotoxin is removed from eluting STF2.HA1-2 (IND) (SEQ ID NO: 159) with the 50 mM acetate, 1% Triton X-100, 8 M Urea, pH 4 wash and with proper elution conditions. This was tested using STF2.HA1-2 (VN) (SEQ ID NO: 95) Comparing two separate cation exchange runs (Toso SP650M resin) with and without the 50 mM acetate, 1% Triton X-100, 8 M Urea, pH 4 wash (ER wash vs. no ER wash), the endotoxin concentration in the ER wash elution at 150 mM NaCl shows significantly less endotoxin concentration that the 250 mm NaCl elution from the same run, or in either of the elutions without the 50 mM acetate, 1% Triton X-100, 8 M Urea, pH 4 wash.

| | | | | [protein] | |
|---|---|---|---|---|---|
| | Elution | [Endotoxin] | [Endotoxin] | by | UV |
| Run | (mM NaCl) | (EU/mL) | (EU/mg) | BCA (g/L) | 280/260 |
| Load | N/A | 4.4 × 10⁶ | 1.8 × 10⁶ | 2.39 | — |
| No ER | 100 | 7.9 × 10⁶ | 4.2 × 10⁶ | 1.44 | 1.05 |
| wash | 250 | 8.0 × 10⁶ | 4.1 × 10⁶ | 1.12 | 2.76 |
| ER | 150 | 5,112 | 2,888 | 1.77 | 0.982 |
| Wash | 250 | 24,440 | N/A | N/A | 0.545 |

[0526] Refolding: The CEX eluate was dialyzed against 50 mM Tris, 8 M Urea, pH 8 buffer, and refolded by rapid dilution into 10 volumes of 50 mM Tris, pH 8.

[0527] Anion Exchange Chromatography (AEX): The refolded protein was applied to a 25 ml GE Source Q column. This step is designed to separate properly folded STF2.HA1-2 (IND) (SEQ ID NO: 159) from aggregates and host cell proteins and to reduce the endotoxin concentration of the eluate as compared to the load. After loading, the column was washed with five column volumes of 50 mM Tris, 25 mM NaCl, pH 8. The protein was eluted in a 0-100% gradient to 1 M NaCl. A peak enriched for properly folded STF2.HA1-2(IND) (SEQ ID NO: 159) with low endotoxin (1.7 EU/mL) eluted at approximately 150 mM NaCl. A second peak eluting at approximately 170 to 270 mM NaCl contains other proteins including STF2.HA1-2 (IND) (SEQ ID NO: 159) aggregates. Fractions in first peak were pooled at stored at 4° C. Fractions from the first peak were kept for further processing. The presence of STF2.HA1-2 (IND) (SEQ ID NO: 159) in the first and second elutions was confirmed by SDS PAGE. STF2.HA1-2 (IND) (SEQ ID NO: 159) purification across this step was determined by comparing the number and intensity of protein bands in the load material to those in the elution.

[0528] Preparative size exclusion chromatography (SEC): The AEX eluate was run on a 320 ml SEC column in 2×5 mL fractions against TBS. This step is designed to separate correctly folded STF2.HA1-2 (IND) (SEQ ID NO: 159) from other proteins. Each run resulted in elution of a single major peak which was collected, pooled, and filtered through a 0.22 μm filter. The product was stored at −70° C.

[0529] The presence of STF2.HA1-2 (IND) (SEQ ID NO: 159) in the elution was confirmed by SDS PAGE. STF2.HA1-2 (IND) (SEQ ID NO: 159) purification across this step was determined by comparing the number and intensity of protein bands in the load material to those in the elution. The final material profile on SDS PAGE is a strong single band.

### Results and Discussion

[0530] Final characterization of protein: Recombinant STF2.HA1-2(IND) (SEQ ID NO: 159) protein was expressed in E. coli and purified to homogeneity. The final product was formulated in 1×TBS (27.7 mM Tris, 2.7 mM KCl, 137 mM NaCl, pH 7.4; made from 10× stock, Teknova catalog #T9530) and stored at −70° C. in aliquots of 1.0 ml. The final yield was 15.75 ml (45 ml at a concentration of 0.35 mg/ml), with an endotoxin level of 1.1 EU/mg protein as determined by the LAL method. The protein retained TLR5 biological activity as measured in a cell-based assay of cytokine release

[0531] SDS-PAGE: Protein identity was determined, and purity estimated, by SDS-PAGE. An aliquot sample was diluted in SDS-PAGE sample buffer and diluent. The samples were boiled for 5 minutes and loaded onto a 4 to 12% SDS polyacrylamide gel (Invitrogen NuPage) and electrophoresed. The gel was stained with Coomassie R-250 to visualize protein bands. Positive results for STF2.HA1-2 (IND) (SEQ ID NO: 159) were indicated by a band at about 75 kDa as compared to BioRad precision plus standards run on the same gel. Purity is estimated by visually comparing the intensity of the STF2.HA1-2 (IND) (SEQ ID NO: 159) band to all other bands.

[0532] TLR5 bioactivity assay: HEK293 cells constitutively express TLR5, and secrete several soluble factors, including IL-8, in response to TLR5 signaling. Cells were seeded in 96-well microplates (50,000 cells/well), and test proteins were added and incubated overnight. The next day, the conditioned medium was harvested, transferred to a clean 96-well microplate, and frozen at −20° C. After thawing, the conditioned medium was assayed for the presence of IL-8 in a sandwich ELISA using an anti-human IL-8 matched antibody pair (Pierce, #M801E and #M802B) following the manufacturer's instructions. Optical density was measured using a microplate spectrophotometer (FARCyte, Amersham).

[0533] Endotoxin assay: Endotoxin levels were determined using the QCL-1000 Quantitative Chromogenic LAL test kit (Cambrex), following the manufacturer's instructions for the microplate method.

[0534] Protein assay: Total protein concentration was determined using the Micro BCA (bicinchoninic acid) Assay (Pierce) in the microplate format, using bovine serum albumin as a standard, according to the manufacturer's instructions.

[0535] UV280/260 assay: This assay is a measure of the nucleic acid concentration in a sample as compared to the protein concentration. The absorbance maximum occurs at approximately 260 nm for nucleic acids, while the absorbance maximum occurs for proteins at approximately 280 nm. A higher ratio between the absorbance at 280 nm versus the absorbance at 260 nm indicates a sample enriched in protein over nucleic acids.

### Example 11

### Cloning, Expression, and Biochemical Characterization of Recombinant Flagellin-Hemagglutinin Fusion Proteins Produced in Drosophila

### Materials and Methods

[0536] Cloning and expression of HA in Drosophila: RNA was isolated from the influenza A strain A/Puerto Rico/8/34 using QIAamp MinElute Virus Spin Kit (Qiagen, Cat#57704) following the manufacturer's instructions. The HA RNA was reverse transcribed using SuperScript III First Strand Synthesis System for RT-PCR (Invitrogen; Cat #18080-051) or SuperScript III One-Step RT-PCR System with Platinum-Taq High Fidelity (Invitrogen; Cat# 12574-030) following the manufacturer's instructions, and the cDNA was cloned using the TOPO cloning vector PCRII Zero Blunt (Invitrogen). The HA0s fragment (HA gene without the signal sequence and trans-membrane domain) was then sub-cloned into pMT/STF2Δ at both the C-terminus and NH2 terminus of the cassette using PCR-based strategy to generate the constructs STF2Δ.HA0s (PR8) (SEQ ID NO: 160) and HA0s (PR8).STF2Δ (SEQ ID NO: 167) respectively. The HA gene was also cloned into the pMT/Bip/V5-his vector without STF2Δ to generate the construct HA0s.his (SEQ ID NO: 170). Table 10 list the constructs and the primers used in their construction.

TABLE 10
PR8 HA constructs for expression in Drosophila

| | | | | DNA |
|---|---|---|---|---|
| SEQ ID | | FOR Primer | REV Primer | Template |
| NO: | Construct | SEQ ID NO: | SEQ ID NO: | SEQ ID NO: |
| 160 | STF2Δ.HA0sHis | 161 | 162 | 163 |
| 164 | STF2Δ.HA0s | 165 | 166 | 163 |
| 167 | HA0s.STF2Δ | 168 | 169 | 163 |
| 170 | HA0sHis | 171 | 172 | 163 |
| 173 | HA0s | 174 | 175 | 163 |

[0537] Recombinant protein expression from Drosophila Dme1-2 cells: The HA0s.His (SEQ ID NO: 170) and STF2Δ.HA0s (SEQ ID NO: 164) plasmids were co-transfected with the pCoBlast plasmid into Drosophila Dme1-2 cells to generate Dme1-2 HA0sHis(PR8) and Dme1-2 STF2Δ.HA0s(PR8) stable cells. Dme1-2 stable cells were expanded from adherent to shaker cultures in selection media [Drosophila Sfm medium (Invitrogen; Carlsbad, Calif.)+25 μg/ml blasticidin] and then expanded to a 12 L production scale.

[0538] Recombinant protein expression was induced by the addition of CuSO₄ to a final concentration of 0.5 mM. After incubation for 72 hours cells were removed from the conditioned medium by centrifugation. The conditioned medium was then clarified by passing through a 0.22 μm filter and stored at 4° C.

[0539] Purification of HA0sHis(PR8) (SEQ ID NO: 176): Conditioned medium was applied to a Chelating Sepharose column (GE/Amersham Biosciences; Piscataway, N.J.) charged with NiSO₄ and equilibrated in Buffer A [20 mM Tris, pH 8.0, 0.5 M NaCl] and eluted in a linear gradient with Buffer B [Buffer A+0.5 M imidazole]. The protein was further purified by fractionation on a Superdex 200 SEC column (GE/Amersham Biosciences; Piscataway, N.J.) equilibrated in 1× Tris-buffered saline (TBS), pH 8.0. HA0s.His₆(PR8) fractions were pooled, aliquoted and stored at −80° C.

[0540] SDS-PAGE and western blot analysis: Protein identity was determined, and purity estimated, by SDS-PAGE. An aliquot of 5 μg of each sample was diluted in SDS-PAGE sample buffer with or without 100 mM DTT as a reductant. The samples were boiled for 5 minutes and loaded onto a 10% SDS polyacrylamide gel (LifeGels; French's Forrest, New South Wales, AUS) and electrophoresed. The gel was stained with Coomassie R-250 (Bio-Rad; Hercules, Calif.) to visualize protein bands. For western blot, 0.5 μg/lane total protein was electrophoresed as described above and the gels were then electro-transfered to a PVDF membrane and blocked with 5% (w/v) dry milk before probing with anti-flagellin antibody (Inotek; Beverly, Mass.), anti-His₆.antibody (Invitrogen; Carlsbad, Calif.) or influenza A PR/8/34 convalescent immune serum (described below under Protein Antigenicity ELISA). After probing with alkaline phosophatase-conjugated secondary antibodies (Pierce; Rockford, Ill.), protein bands were visualized with an alkaline phosphatase chromogenic substrate (Promega; Madison, Wis.).

[0541] Protein assay: Total protein concentration was determined using the Micro BCA (bicinchoninic acid) Assay (Pierce; Rockford, Ill.) in the microplate format, using bovine serum albumin as a standard, according to the manufacturer's instructions.

[0542] Endotoxin assay: Endotoxin levels were determined using the QCL-1000 Quantitative Chromogenic LAL test kit (Cambrex; E. Rutherford, N.J.), following the manufacturer's instructions for the microplate method.

[0543] TLR5 bioactivity assay: HEK293 cells constitutively express TLR5, and secrete several soluble factors, including IL-8, in response to TLR5 signaling. Cells were seeded in 96-well microplates (50,000 cells/well), and recombinant drosophila conditioned medium containing either HA0sHis(PR8) (SEQ ID NO: 176) or STF2Δ.HA0s (PR8) (SEQ ID NO: 177) was added. The next day, the conditioned medium was harvested, transferred to a clean 96-well microplate, and frozen at −20° C. After thawing, the conditioned medium was assayed for the presence of IL-8 in a sandwich ELISA using an anti-human IL-8 matched antibody pair (Pierce; Rockford, Ill., #M801E and #M802B) following the manufacturer's instructions. Optical density was measured using a microplate spectrophotometer (FARCyte, GE/Amersham; Piscataway, N.J.).

[0544] Protein antigenicity ELISA: Purified HA0s.His₆(PR8) (SEQ ID NO: 176) was tested by ELISA to determine if the recombinant protein displayed correctly folded epitopes of HA. 96-well ELISA plates were coated overnight at 4° C. with serial dilutions in PBS (100 μl/well) of HA0s.His₆(PR8) (SEQ ID NO: 176) protein starting at 5 μg/ml. Plates were blocked with 200 μl/well of Assay Diluent Buffer (ADB; BD Pharmingen) for one hour at room temperature, then washed three times in PBS-T. A fixed dose of primary antibody was then added to each well. To assay HA reactivity, 100 μl/well of a 1:10,000 dilution of non-immune or PR/8/34 convalescent immune serum in ADB was added. PR/8/34 immune serum was generated in BALB/c mice (Jackson Laboratory, Bar Harbor, Me.) that received an experimentally determined sublethal challenge dose of 8×10¹ egg infectious dosages (EID) of PR/8/34 influenza virus.

[0545] Animals were then allowed to convalesce for >21 days post-infection at which time immune serum was isolated and clarified. For ELISA of the 6× histidine tag, monoclonal antibody against 6× His (Invitrogen; Carlsbad, Calif.), or flagellin (Inotek; Beverly, Mass.) was added at 1 μg/ml in ADB (100 μl/well) and the plates were incubated for 1 hr at room temperature or overnight at 4° C. The plates were then washed three times with PBS-T. HRP-labeled goat anti-mouse IgG antibodies (Jackson Immunochemical; West Grove, Pa.) diluted in ADB were added (100 μl/well) and the plates were incubated at room temperature for 1 hour. The plates were washed three times with PBS-T. After adding TMB Ultra substrate (Pierce; Rockford, Ill.) and monitoring color development, A₄₅₀ was measured on a microplate spectrophotometer (FARCyte, GE/Amersham; Piscataway, N.J.).

### Results and Discussion

[0546] Characterization of Drosphila-expressed HA0s proteins: Western blot analysis of conditioned media with anti-His₆ antibody (Invitrogen; Carlsbad, Calif.) confirmed expression of HA0sHis(PR8) (SEQ ID NO: 176) and western blot with anti-flagellin antibody (Inotek; Beverly, Mass.) confirmed expression of STF2Δ.HA0s(PR8) (SEQ ID NO: 177) by Drosophila Dme1-2 cells transfected with the corresponding expression plasmid. Both proteins were recognized by western blot in non-reduced form with mouse PR/8/34 convalescent immune serum while reduction of the proteins with DTT abrogated recognition. This result indicates correct disulfide bonding of the two secreted proteins. The STF2Δ.HA0s(PR8) (SEQ ID NO: 177) conditioned medium showed significant in vitro TLR5 activity while the HA0sHis₆(PR8) (SEQ ID NO: 176) medium did not, as expected. Finally, purified HA0sHis₆(PR8) (SEQ ID NO: 176) protein showed significant reactivity with influenza A PR8/34 convalescent immune serum by ELISA. These results indicate that both HA0s proteins are secreted from Drosophila Dme1-2 cells in a properly folded form.

### Example 12

### Immunogenicity and Efficacy of Recombinant Flagellin-Hemagglutinin Fusion Proteins Representing Viral Strain A/Viet Nam/1203/04

### Materials and Methods

[0547] Animal studies: Female BALB/c mice were used at the age of 6-8 weeks. Mice were divided into groups of 15 and received subcutaneous (s.c) immunizations on days 0 and 14 as follows:
[0548] TBS (phosphate buffered saline)
[0549] No immunization
[0550] 10 μg of STF2.HA1-2(VN) (SEQ ID NO: 95) in TBS
[0551] 3.0 μg of STF2.HA1-2(VN) (SEQ ID NO: 95) in PBS
[0552] 1 μg of STF2.HA1-2(VN) (SEQ ID NO: 95) in TBS

[0553] Mice were bled on day 21 and sera were clarified by clotting and centrifugation and stored at −20° C.

[0554] Serum antibody determination: HA-specific IgG levels were determined by ELISA. 96-well ELISA plates (Costar (Cat #9018) Corning, N.Y.) were coated overnight at 4° C. with 100 μl/well recombinant HA protein from A/Vietnam/1203/04, produced in Baculovirus, (BEIR catalog number NR-660) in PBS (1 μg/ml). Plates were blocked with 300 μl/well of Assay Diluent Buffer (ADB; BD Pharmingen, (Cat#: 555213)(San Diego, Calif.) for two hours at 25° C. The plates were washed three times in PBS+0.05% (v/v) Tween 20 (PBS-T). Dilutions of the sera in ADB were added (100 μl/well) and the plates were incubated for 1.5 hours at 25° C. The plates were washed three times with PBS-T. HRP-labeled goat anti-mouse IgG antibodies (Jackson Immunochemical, West Grove, Pa. (Cat#: 115-035-146)) diluted in ADB were added (100 μl/well) and the plates were incubated at 25° C. for 30 minutes. The plates were washed three times with PBS-T. After adding TMB Ultra substrate (Pierce (Cat 34028), Rockford, Ill.)) and monitoring color development, A₄₅₀ was measured on a SpectraMax 190 (Molecular Devices, Sunnyvale, Calif.) microplate spectrophotometer.

[0555] Influenza virus challenge of mice: To assess efficacy, mice were challenged on day 28 by intranasal administration of 10 LD₉₀ (10× dose lethal to 90% of mice) (6×10³ EID) of influenza A/Viet Nam/1203/04. Animals were monitored daily for 21 days following the challenge for survival and clinical presentation.

[0556] Preparation of Influenza H5N1 Stocks: Influenza A/Vietnam/1203/04 (H5N1) was obtained from the Centers for Disease Control and Prevention (Atlanta, Ga.). Stocks of the virus were prepared in 10-day-old embryonated chicken eggs, and aliquots of 0.5 ml were stored at −80° C. until use.

[0557] Determination of Viral Titers: TCID₅₀ (50% tissue culture infectious dose) was determined utilizing MDCK cells seeded into the wells of 96-well plate and grown to confluency. A series of log₁₀ dilutions of the virus was inoculated onto the plate in quadruplicates. The plate was then incubated for 48-72 hours. The TCID₅₀ was determined by identifying the dilution at which quadruplicate wells were ½ positive and ½ negative for viral growth. The EID₅₀ was determined by inoculating log₁₀ dilutions of the stock into 2-4 eggs per dilution. Eggs were incubated for 40-48 hours, and 1 ml of the allantoic fluid was harvested from each egg. EID₅₀ was calculated as the dilution at which ½ of the eggs were negative and ½ of the eggs were positive for infectious virus.

### Results and Discussion

[0558] Induction of HA-specific IgG response following immunization with STF2.HA1-2(VN) (SEQ ID NO: 95): The immunogenicity of STF2.HA1-2(VN) (SEQ ID NO: 95) was examined by immunizing BALB/c mice (15/group) subcutaneously on day 0 and 14 with a dose range of 10, 3, and 1 μg protein. Negative control groups of mice were immunized with TBS or not immunized. HA-specific IgG responses were examined 7 days post boost (Day 21) by ELISA. The results demonstrate that immunization with 10, 3 or 1 μg of STF2.HA1-2(VN) (SEQ ID NO: 95) induced consistent and significant HA-specific IgG responses in a dose-dependent manner (FIGS. 14-16).

[0559] Immunization with STF2.HA1-2(VN) (SEQ ID NO: 95) provides protection from a lethal challenge with influenza A: The serological analysis described above demonstrated that immunization of mice with STF2.HA1-2(VN) (SEQ ID NO: 95) generated an antibody response that recognized native HA. In order to evaluate efficacy, the same mice were challenged on day 28 with 10 LD₉₀ (6×10³EID) of A/Viet Nam/1203/04 virus administered intra-nasally. Mice were monitored daily for 21 days following the challenge for survival and clinical presentation. As shown in FIG. 17, TBS-immunized or naïve mice showed signs of infection (weight loss and lower clinical scores) as early as five days post-challenge and all mice died by day nine post-challenge. For the mice immunized with STF2.HA1-2(VN), there is a clear relationship between the dose received and efficacy. Mice immunized with 10 μg of STF2.HA1-2(VN) (SEQ ID NO: 95) demonstrated markedly enhanced protection. Mice immunized with 3 or 1 μg of STF2.HA1-2(VN) (SEQ ID NO: 95) demonstrated a modest to a negligible impact on efficacy, respectively. Clinical parameters were similarly related to dose and animals receiving the highest dose of STF2.HA1-2(VN) (SEQ ID NO: 95) exhibited the mildest signs of disease. These results demonstrate that E. coli-expressed STF2.HA1-2(VN) (SEQ ID NO: 95) induces HA-specific immune responses that successfully protect BALB/c mice from a lethal challenge with virulent influenza A virus in vivo.

### Example 13

### Flagellin Proteins with Engineered Cysteine Residues

### For Chemical Conjugation

[0560] The crystal structure for the bacterial flagellin S. typhimurium flagellin type 2 (STF2, SEQ ID NO: 312) has been reported (Yonekura, K., et al., Nature 424:643-650 (2003)). Complete atomic model of the bacterial flagellar filament by electron cryomicroscopy has been reported, and the most detailed structure-function study of the TLR5 activation was based on this structure (Smith, K. D., et al., Nature Immunology 4:1247-1253 (2003)). Toll-like Receptor 5 (TLR5) recognizes a conserved site on flagellin required for protofilament formation and bacterial motility (Nature Immunology 4(12):1247-1253). Mutational analysis demonstrated that the TLR5 activity of flagellin resides in two regions in the N- and C-terminal domains, stretches of 39 and 31 amino acids, respectively (Smith, et al.). These regions are highlighted in grey in FIG. 18. Alanine-scanning mutagenesis of these regions identified a number of mutations which reduced TLR5 activation, but no single mutation completely abrogated activity, suggesting that there is a degree of flexibility or redundancy in the TLR5 binding site. This makes sense from an evolutionary perspective, otherwise the bacteria could easily evolve to evade detection by TLR5. Deletion of the hypervariable hinge region and retention of the conserved N- and C-terminal domains results in a protein (STF2Δ) that retains full TLR5 activity, demonstrating that the N- and C-terminal domains (together) are necessary and sufficient for TLR5 activation.

[0561] Lysine residues are convenient substrates for chemical conjugation of diverse chemical structures to a protein carrier such as flagellin. Of the 30 lysine residues in STF2 (SEQ ID NO: 312), only one lies within the experimentally-defined TLR5 activation site, and this particular lysine is not conserved among all bacterial flagellins (Smith, et al., Nature Immunology 4:1247-1253 (2003)). Of the remaining 29 lysines, 24 are located in the hypervariable hinge region of flagellin, thus leaving only 5 lysine residues in STF2Δ (SEQ ID NO: 313). The structure in FIGS. 19 and 20 shows that most lysines are spatially distal to the TLR5 activation domain, thus it would seem that lysines could be randomly conjugated with peptide or carbohydrate antigens with a reasonable probability of not interfering with the TLR5 activity of the resulting conjugated STF2Δ (SEQ ID NO: 313) protein. Five lysines appear to border the TLR5 activation site quite closely; these residues would be the first to consider mutating if antigen conjugation to lysine affects TLR5 activity.

[0562] Possible additional sites for conjugation (such as cysteines or additional lysines) may be engineered into full-length flagellin (STF2 (SEQ ID NO: 312)) or STF2Δ (SEQ ID NO: 313) by placing such residues in the hypervariable region or in the tail of the conserved N- and C-terminal domains distal to the TLR5 binding site. Chemical methods for conjugation to other amino acids also exist. These include carboxy amino acids (glutamic acid, aspartic acid) and the carboxyl terminal amino acid, arginine, histidine, tryptophan, tyrosine, and serine. Any of these strategies may be utilized to conjugate antigenic structures to flagellin without intefering with the TLR5 activation site.

[0563] Some types of antigens including polysaccharides are not amenable to recombinant fusion DNA technology nor to synthetic peptide chemistry, and thus cannot be genetically or synthetically linked to a ligand for a Toll-like Receptor (TLR). In addition, it is possible that genetic or synthetic fusion of a peptide to a TLR ligand may inhibit the proper folding of the TLR ligand. Chemical conjugation of the antigen to the TLR ligand, which is folded and purified, may be useful. The chemical conjugation of peptide antigens also permits the placement of antigen at specific sites on the TLR ligand, thus limiting interference with receptor binding of the TLR ligand or maximizing exposure to antigen receptors. The conjugation of many peptide antigens to a TLR ligand may also maximize immunogenicity by increasing the conformational heterogeneity with which antigen is presented to the immune system. To provide a site for chemical conjugation of such antigens to flagellin, a cysteine residue was engineered at different sites in the gene encoding STF2Δ (flagellin with the hypervariable hinge region deleted; SEQ ID NO: 313 and SEQ ID NO: 314).

### Materials and Methods

[0564] Polymerase chain reaction (PCR): Platinum® PCR SuperMix High Fidelity kit (catalog number 12532-016, Invitrogen Corporation, Carlsbad, Calif.) was used for all PCR amplifications using the following protocol based on the manufacturer's instructions.
[0565] 1. The following components were added in any order to each reaction tube:
   [0566] a. 45 μl Platinum® PCR SuperMix High Fidelity (PCR reaction buffer)
   [0567] b. Primer solution (10 pMol final concentration of each primer)
   [0568] c. Template DNA solution (10 ng plasmid DNA)
[0569] 2. Reaction volume was made up to 50 μl with water
[0570] 3. Tubes were capped and loaded in thermal cycler
[0571] 4. Tubes were incubated at 94° C. for 30 to 120 seconds to completely denature the template and activate the enzyme
[0572] 5. The following PCR amplification was performed for 25-35 cycles:
   [0573] a. Denature at 94° C. for 15-30 seconds
   [0574] b. Anneal at 50-55° C. for 15-30 seconds
   [0575] c. Extend at 68-72° C. for 1 minute per kb of PCR product size
   [0576] d. If necessary, cool to 4° C. and hold until ready for next process

[0577] Construction of STF2Δ gene (SEQ ID NO: 314): Full length flagellin of Salmonella typhimurium fljb (STF2, SEQ ID NO: 312) is encoded by a 1.5 kb gene (SEQ ID NO: 315). To generate STF2Δ (SEQ ID NO: 314), the sequence corresponding to the hypervariable hinge region (amino acids 170 to 415 of SEQ ID NO: 312) was deleted and replaced with a short flexible linker (GAPVDPASPW (SEQ ID NO: 336)) designed to facilitate interactions of the NH2 and COOH terminal sequences of STF2 (SEQ ID NO: 315) necessary for TLR5 signaling (Smith, K. D., et al., (2004). Toll-like Receptor 5 recognizes a conserved site on flagellin required for protofilament formation and bacterial motility (Smith, et al., Nature Immunology 4:1247-53 (2003)).

[0578] To generate the STF2Δ plasmid, a two-step PCR was used (FIG. 21). In the first reaction, a plasmid encoding STF2.OVA (a fusion of full-length STF2 with full-length ovalbumin, SEQ ID NO: 316) was mixed with primers STF28BGF-1 (SEQ ID NO: 317) and STF28MCR-1 (SEQ ID NO: 318) in PCR reaction buffer, and the mixture was amplified in a PCR reaction as described above. In a parallel reaction, STF2.OVA template plasmid was mixed with primers STF28.MCF-2 (SEQ ID NO: 319) and STF28ECR-2 (SEQ ID NO: 320) in PCR reaction buffer, and the mixture was amplified in a PCR reaction as described above.

[0579] The PCR amplification reactions generated ˜500 bp and 270 bp fragments, respectively. These PCR products were combined with primers STF28BGF-1 (SEQ ID NO: 317) and STF28ECR-2 (SEQ ID NO: 320) in PCR reaction buffer, and the mixture was amplified in a PCR reaction as described above. The amplified DNA product from this reaction (770 bp) was digested with BglII and EcoRI restriction enzymes for 2 hours at 37° C., and ligated into pMTBiP/V5-His B (Invitrogen, Carlsbad, Calif.) that had previously been digested with BglII and EcoRI and treated with calf intestinal phosphatase (CIP). An aliquot of the ligation mix was used to transform E. coli TOP10 cells. The resultant construct pMT/STF2Δ was used to generate the cysteine modified STF2Δ constructs.

[0580] Construction of STF2Δ genes engineered to express a single cysteine residue: To introduce cysteine residues at defined positions in the STF2 polypeptide, pMT/STF2Δ was used as a template in PCR with primer pairs as defined below.

[0581] To construct the STF2Δ.3′Cys (SEQ ID NO: 325) plasmid, pMT/STF2Δ plasmid was mixed with 3′Forward1 (SEQ ID NO: 321) and 3′Reverse1 (SEQ ID NO: 322) primers in PCR reaction buffer, and the mixture was amplified in a PCR reaction as described above.

[0582] To construct the 5′Cys.STF2Δ (SEQ ID NO: 326) plasmid, pMT/STF2Δ plasmid was mixed with 5′Forward2 (SEQ ID NO: 323) and 5′Reverse2 (SEQ ID NO: 324) primers in PCR reaction buffer, and the mixture was amplified in a PCR reaction as described above.

[0583] For STF2Δ.3′Cys (SEQ ID NO: 325) and 5′Cys.STF2Δ (SEQ ID NO: 326) constructs, the PCR products generated were digested with Nde1 and Blp1 restriction enzymes and purified by agarose gel electrophoresis. The purified fragments were ligated by compatible ends to pET24a (Novagen, Madison, Wis.) plasmid DNA that had been previously digested with NdeI and BlpI restriction enzymes and CIP-treated. The resulting constructs are designated pET/STF2Δ.3′Cys and pET/5′Cys.STF2Δ, respectively.

[0584] To construct the STF2Δ.HingeCys (SEQ ID NO: 331) plasmid, a two step PCR similar to that described in FIG. 18 was employed. One fragment was generated by mixing pMT/STF2Δ with paired HingeForward1 (SEQ ID NO: 327) and HingeReverse3 (SEQ ID NO: 328) primers in PCR reaction buffer, and the mixture was amplified in a PCR reaction as described above. Another fragment was generated by mixing pMT/STF2Δ with paired HingeForward2 (SEQ ID NO: 329) and HingeReverse4 (SEQ ID NO: 330) primers in PCR reaction buffer, and the mixture was amplified in a PCR reaction as described above. Aliquots from each of these PCR reactions were combined and mixed with HingeForward1 (SEQ ID NO: 327) and HingeReverse4 (SEQ ID NO: 330) primers in PCR reaction buffer, and the mixture was amplified in a PCR reaction as described above. The final PCR product was purified by agarose gel electrophoresis and digested with Nde1 and Blp1, and the purified fragment was ligated into the pET24a vector as described above. The resulting construct is designated pET/STF2Δ.HingeCys.

[0585] Protein expression: Plasmids pET/STF2Δ.3′Cys, pET/5′Cys.STF2Δ, and pET/STF2Δ.HingeCys were transformed into competent E. coli BLR(DE3) cells as follows. To a 1.5-ml snap-cap polypropylene tubes pre-chilled on ice was added 20 μl aliquot of BLR (DE3) cells and 1 μl plasmid DNA (1 μg/μl), and the mixture was incubated for 30 minutes. The tubes were heated for exactly 30 seconds in a 42° C. water bath without shaking, and then placed on ice for an additional 2 minutes. To each tube of heat shocked cells were added 250 μl of room temperature SOC medium.

[0586] The cells were recovered at 37° C. (shaking at 250 rpm) for 60 minutes prior to plating on selective media containing kanamycin. Various ailquots (50-100 μl) of the transformation mix were plated and the plates were incubatedat 37° C. for 15 to 18 hours. Colonies were picked and inoculated into 2 ml Luria-Bertani (LB) broth supplemented with 25 μg/ml kanamycin and 12.5 μg/ml tetracycline, and cultured overnight. Fresh LB cultures were inoculated by diluting an aliquot of the overnight cultures 1:100 and cultured at 37° C. with shaking. When the OD₆₀₀ of the culture reached 0.6 to 1.0, protein expression was induced by the addition of isopropyl thio-β-D-galactoside (IPTG) to a final concentration of 1 mM. Several hours after induction, the cells were harvested for analysis of protein expression by SDS-PAGE. Glycerol stocks were prepared from cultures grown in LB supplemented with 0.5% glucose, 25 μg/ml kanamycin and 12.5 μg/ml tetracycline and were frozen at −80° C. following the addition of glycerol (7% final).

[0587] Protein purification: Proteins STF2Δ.3′Cys (SEQ ID NO: 332) and STF2Δ.HingeCys (SEQ ID NO: 333) were expressed and purified as follows. Glycerol stocks of E. coli BLR(DE3) cells harboring the desired plasmids were inoculated into 10 L shake-flasks containing LB and incubated at 37° C. with constant shaking. When cultures reached an optical density of A₆₀₀=0.8, protein expression was induced by the addition of 1 mM IPTG and cultures were incubated at 37° C. with constant shaking for 4 hours before harvesting. Cells were collected from 10 L of culture by low-speed centrifugation at 5,000 rpm (SLA3000 rotor) for 10 minutes and suspended in 50 mM Tris-HCl pH 8.0, 1 mM EDTA, 1 mM DTT (100 ml/10 L).

[0588] The cells were disrupted by passing the cell suspension twice through a microfluidizer at 18,000 psi. The insoluble material was separated from soluble proteins by centrifugation at 10,000 rpm (SS34 rotor) for 15 minutes. Under the culture conditions described, all STF2Δ proteins fractionated with the insoluble material and formed stable inclusion bodies that were collected as a solid pellet following centrifugation. The inclusion bodies were washed twice with 50 mM Tris-HCl, pH 8.0, 0.1 M NaCl and 0.5% Triton X-100, followed by two washes with the same buffer without detergent. Each wash was performed using a dounce homogenizer and the cleaned inclusion bodies (IBs) were collected by centrifugation at 10,000 rpm (SS34 rotor) for 15 minutes. The purified IBs were washed a final time with 50 mM Tris-HCl, pH 8.0 and stored as a cell pellet at −80° C. until needed.

[0589] IB material was thawed and solubilized in 8 M urea at pH 4.0. This step selectively solubilized the target protein while leaving a significant amount of debris and contaminating proteins as a solid precipitate which was removed by centrifugation. Because of the single cysteine present in these proteins, all subsequent purification procedures were carried out using buffers containing 1 mM DTT as a reducing agent. Solubilized protein was captured using SP fast flow sepharose (30 ml, XK16) and selectively eluted with 8 M urea in 25 mM Na Acetate (C₂H₃O₂Na), pH 4.0, 1 mM DTT, 1 mM EDTA and 0.2 M NaCl. To eliminate protein precipitation following this step, the pH of the SP elution was adjusted from 4.0 to 8.0 by dialysis against 50 mM Tris-HCl, pH 8.0, 1 mM DTT, 1 mM EDTA before protein refolding. The dialyzed material was refolded by direct dilution (10-fold) into 50 mM Tris-HCl pH 8.0, 1 mM DTT and 1 mM EDTA such that the final protein concentration was less than 0.1 mg/ml. The refolded SP pool was loaded directly onto Q high performance sepharose (30 ml, XK16) and bound protein was eluted with a 20 column volume linear gradient from 0 to 0.5 M NaCl in 50 mM Tris-HCl, pH 8.0, 1 mM DTT, 1 mM EDTA. This chromatography step yielded a single peak that eluted at a conductivity of approximately 15 ms/cm. The eluted material was pooled and stored at −80° C.

[0590] Protein characterization: Proteins were characterized for purity, identity, endotoxin content, and biological activity using the following assays.

[0591] SDS-PAGE: Proteins (typically 5 μg) were diluted in SDS-PAGE sample buffer (1% SDS, 30 mM Tris-HCl, pH 6.8, 4% glycerol, 0.1 mg/ml bromophenol blue) with and without 5 mM β-mercaptoethanol. The samples were boiled for 5 minutes and loaded onto a 4-20% SDS polyacrylamide gel. Following electrophoresis, gels were stained with coomassie blue to visualize protein bands.

[0592] Endotoxin assay: Endotoxin levels were measured using the QCL-1000 Quantitative Chromogenic LAL test kit (BioWhittaker #50-648 U), following the manufacturer's instructions for the microplate method.

[0593] Protein Assay: Protein concentrations were determined by the MicroBCA Protein Assay Reagent Kit in a 96-well format using BSA as a standard (Pierce Biotechnology), following the manufacturer's instructions.

[0594] Flagellin ELISA: Protein integrity and concentration were examined by ELISA with antibodies specific for flagellin. 96-well ELISA plates were coated overnight at 4° C. with serial dilutions of each target protein, in PBS starting at 5 μg/ml. Plates were blocked with 200 μl/well of Assay Diluent Buffer (ADB; BD Pharmingen) for one hour at room temperature then washed three times in phosphate-buffered saline containing Tween-20 (PBS-T, 12 mM NaPO₄, 137 mM NaCl, 2.7 mM KCl, 0.05% Tween 20). Rabbit polyclonal anti-flagellin antibody diluted in ADB (100 μl/well, 1:5000) was added to all wells and the plates were incubated for 1 hour at room temperature or overnight at 4° C., then washed three times with PBS-T. HRP-labeled goat anti-rabbit IgG antibody (Jackson Immunochemical) diluted in ADB was added (100 μl/well, 1:5000) and the plates were incubated at room temperature for 1 hour. The plates were washed three times with PBS-T. After adding TMB Ultra substrate (Pierce) and monitoring color development, A₄₅₀ was measured on a Tecan Farcyte microplate spectrophotometer.

[0595] TLR5 bioactivity assay: HEK293 cells (ATCC, Cat#CRL-1573, Manassas, Va.) constitutively express TLR5, and secrete several soluble factors, including IL-8, in response to TLR5 signaling. Cells were seeded in 96 well microplates (50,000 cells/well), and recombinant test proteins were added. The next day, the conditioned medium was harvested, transferred to a clean 96-well microplate, and frozen at −20° C. After thawing, the conditioned medium was assayed for the presence of IL-8 in a sandwich ELISA using an anti-human IL-8 matched antibody pair (Pierce; Rockford, Ill., #M801E and #M802B) following the manufacturer's instructions. Optical density was measured using a microplate spectrophotometer

### Results and Discussion

[0596] Protein yield and purity: The final yield and endotoxin levels of each protein are shown below.

| Protein | SEQ ID NO: | Yield (mg) | Endotoxin (EU/μg) |
|---|---|---|---|
| STF2Δ.3′Cys | 332 | 75.0 | 0.01 |
| STF2Δ.HingeCys | 333 | 117.0 | 0.004 |

[0597] Flagellin integrity: Engineering a single cysteine into STF2Δ does not diminish its recognition by flagellin-specific antibodies, as shown in FIG. 22.

[0598] TLR5 agonist activity in the HEK293 IL-8 assay: Engineering a single cysteine into STF2Δ does not diminish the TLR agonist activity of the protein, as shown in FIG. 23. Cells exposed to STF2Δ.3′Cys (SEQ ID NO: 332) or STF2Δ.HingeCys (SEQ ID NO: 333) secreted IL-8 at levels comparable to those induced by exposure to full-length flagellin (STF2, SEQ ID NO: 312) or STF2Δ without cysteine residues (SEQ ID NO: 313).

[0599] Fusion of full-length flagellin (STF2, SEQ ID NO: 312) or hinge region-deleted flagellin (STF2Δ, SEQ ID NO: 313) to a protein antigen such as West Nile virus envelope protein or influenza A hemagglutinatin significantly increases the immunogenicity of the fused antigen. This approach is useful for protein or peptide antigens which can be encoded in a genetic fusion construct expressing both flagellin and the antigen of interest in a single protein, but it cannot be applied to non-protein or non-peptide antigens, such as polysaccharide antigens. Since many bacteria and tumor cells express specific polysaccharide structures that are antigenic but poorly immunogenic, it is important to devise scalable methods for increasing the immunogenicity and protective efficacy of such structures. Chemical conjugation to a TLR ligand, such as flagellin, is one potential strategy.

[0600] There are several methods of chemical linkage, but one of the simplest is to couple an antigen to a free thiol group such as that on a single, unmatched cysteine residue. Since flagellin does not natively contain any cysteines, cysteine residues were engineered into flagellin at one of three positions: the amino terminus of flagellin (5′Cys.STF2Δ, SEQ ID NO: 326 and SEQ ID NO: 334), the carboxy terminus of flagellin (STF2Δ.3′Cys, SEQ ID NO: 325 and SEQ ID NO: 332), and in the deleted hinge region of flagellin (STF2Δ.HingeCys, SEQ ID NO: 331 and SEQ ID NO: 333). All constructs were produced in the expression vector pET24a for E. coli expression. When purified from E. coli cells, STF2Δ.HingeCys (SEQ ID NO: 333) and STF2Δ.3′Cys (SEQ ID NO: 332) proteins retain all antigenic and TLR5 biological activity properties of the unmodified STF2Δ protein, thus confirming that the introduction of a single cysteine residue does not negatively impact the expression, purification, refolding, or biological activity of STF2Δ.

### Conjugation of Influenza Hemagglutinin Maturational Cleavage Site Peptide to STF2Δ.HingeCYS

[0601] A peptide representing the maturational cleavage site of influenza hemagglutinin was chemically conjugated a modified flagellin protein, STF2Δ.HingeCys (SEQ ID NO: 333).

### Materials and Methods

[0602] Production of STF2Δ.HingeCys protein: STF2Δ.HingeCys protein (SEQ ID NO: 333) was expressed and purified as described in the previous Example.

[0603] Synthesis of H1C1 peptides The sequence NH₂-NIPSIQSRGLFFAIAGFIE-COOH (SEQ ID NO: 337) represents the maturational cleavage site of influenza A/H1N1 hemagglutinin (Bianchi, E., et al. (2005). Universal influenza B vaccine based on the maturational cleavage site of the hemagglutinin precursor (Bianchi, et al., J. Virol. 79:7380-7388 (2005)). Two peptides were designed with an extra cysteine or an extra lysine on the N-terminus to facilitate chemical linkage to carrier proteins, resulting in the following peptide sequences:

CysH1C1 (SEQ ID NO: 338)

(SEQ ID NO: 338)

NH₂-CNIPSIQSRGLFFAIAGFIE-COOH
LysH1C1 (SEQ ID NO: 339)

(SEQ ID NO: 339)

NH₂-KNIPSIQSRGLFFAIAGFIE-COOH

[0604] The peptides were synthesized by Anaspec, Inc., (San Jose, Calif.) utilizing standard Fmoc chemistry, after which they were cleaved from the matrix with trifluoroacetic acid (TFA), purified by reversed-phase HPLC and lyophilized.

[0605] Conjugation of CysH1C1 peptide to STF2Δ.HingeCys: STF2Δ.HingeCys protein (SEQ ID NO: 333) at a concentration of 4.9 mg/mL was dialyzed overnight into Buffer A [1× phosphate-buffered saline (PBS), 5 mM EDTA, pH 7.2]. BM(PEO)₂ (Pierce Biotechnology, Rockford, Ill.), a homobifunctional maleimide crosslinker, was dissolved in DMSO (dimethyl sulfoxide) and added to a final concentration of 2.3 mM. After incubating for 1 hour at room temperature, the free crosslinker was removed from the protein using a 5 ml Superdex 25 HiTrap desalting column. CysH1C1 peptide (SEQ ID NO: 338) was dissolved in DMSO and added to the maleimide-derivatized STF2Δ.HingeCys protein at a final concentration of 0.32 mM. After incubating 3 hours at room temperature, the reaction was stopped by adding DTT (dithiothreitol) to a final concentration of 40 mM. The protein and protein-peptide conjugate were separated from free peptide by fractionation on a Superdex 200 10/300 size-exclusion chromatography (SEC) column (GE/Amersham; Piscataway, N.J.) equilibrated in 1× Tris-buffered saline (TBS), pH 8.0.

[0606] Protein characterization: Proteins were characterized for purity, identity, endotoxin content, and biological activity as described in the previous Example.

### Results and Discussion

[0607] Characterization of the STF2Δ.HingeCys:CysH1C1 peptide conjugate: Conjugation of the CysH1C1 peptide (SEQ ID NO: 338) to STF2Δ.HingeCys (SEQ ID NO: 333) was assayed by SDS-PAGE with coomassie staining Peptide conjugation to the protein resulted in a doublet band in which the faster-migrating band corresponded to the un-conjugated protein and the slower migrating band corresponded to the protein-peptide conjugate.

[0608] A cloudy precipitate was seen in the conjugation mixture due to the low solubility of the peptide. To ascertain if the protein-peptide conjugate was preciptitating, the mixture was centrifuged (16,000×g for 15 minutes) and the resulting pellet and supernatant fractions analyzed by SDS-PAGE. The majority of the peptide-conjugated protein remains in the supernatant indicating that it is still soluble.

[0609] Size-exclusion chromatography (SEC) of the STF2Δ.HingeCys:CysH1C1 conjugate was performed to separate the conjugated protein from remaining crosslinker and unonjugated peptide. A single major protein peak eluted in the included range of the column at the expected volume for monomeric STF2Δ, while there is very little material eluting in the void (FIG. 24), indicating that most of the fractionating protein is monomeric.

[0610] The monomeric nature of the STF2Δ.HingeCys:CysH1C1 conjugate was confirmed by SDS-PAGE analysis of the 5200 fractions (FIG. 25). The protein-peptide conjugate co-elutes with the unconjugated protein in the same ratio as in the load sample, indicating that the conjugate species is a monomer.

[0611] Bioactivity of the STF2Δ.HingeCys:CysH1C1 conjugate mixture was found to be equivalent to the unconjugated STF2Δ.HingeCys protein, indicating that the attachment of the BM(PEO)₂ crosslinker and the peptide conjugation reaction does not inhibit TLR5 stimulatory activity (FIG. 8).

### Conjugation of a Pam₃Cys-Containing Lipopeptide to an Influenza Hemagglutinin Antigen

[0612] Several types of Toll-like Receptors (TLRs) are potently activated by lipids or lipid-conjugates. These include TLR2/1 (diacyl lipoproteins and GPI-linked proteins), TLR2/6 (triacyl lipoproteins and GPI-linked proteins) and TLR4 (lipopolysaccharides). The utility of vaccines composed of antigens liked to such lipids is obvious: the lipids are strong activators of innate immune pathways and yet are themselves poorly immunogenic. However, the production of such conjugates is very complex. Biosynthesis of recombinant lipoproteins in bacteria is limited by low productivity and extreme difficulty in purifying the resulting protein-lipopeptide fusion. Chemical synthesis of lipopeptide antigens is more straight forward, but is limited to peptide antigens. Here we demonstrate the chemical conjugation of a Pam₃Cys lipopeptide, a TLR2/6 agonist, to influenza HA1-1His₆ in a process which bypasses the difficulties inherent in both biosynthesis and complete chemical synthesis of lipidated antigens.

### Materials and Methods

[0613] Production of HA1-1His₆(PR8)Bv (SEQ ID NO: 179) HA1-1His₆ (PR8)Bv was prepared as described herein.

[0614] Synthesis of Pam₃CS(K)₄GC (SEQ ID NO: 335) Custom lipopeptide synthesis was performed by Anaspec, Inc. (San Jose, Calif.) using standard solid-phase Fmoc chemistry, after which the lipopeptide was cleaved from the matrix with trifluoroacetic acid (TFA), purified by reversed-phase HPLC and lyophilized.

[0615] Conjugation of Pam₃CS(K)₄GC (SEQ ID NO:335) to HA1-1His₆(PR8)Bv (SEQ ID NO: 179) HA1-1His₆(PR8)Bv (SEQ ID NO: 179) was dialyzed into Buffer A (1×PBS+5 mM EDTA, pH 7.2). Sulfo-SMCC (Pierce; Rockland, Ill.) a heterobifunctional maleimide/NHS-ester crosslinker was dissolved in DMSO and added to a final concentration of 0.432 mM. After incubating for 30 min. at room temperature the protein was desalted into Buffer A using a G-25 HiTrap desalting column (GE/Amersham; Piscataway, N.J.). Triton X-114 (TX-114) (Sigma; St Louis, Mo.) was added to a final concentration of 1% (w/v). Pam₃CS(K)4GC was dissolved to 20 mg/ml in DMSO and added to a final concentration of 0.6 mg/ml. After incubating at room temperature for 3 hours, the reaction tube was placed in a 37° C. bath for 10 minutes to cause TX-114 droplet formation. The sample was then centrifuged at 16,000×g for 10 minutes to separate the detergent and aqueous phases. After drawing off the aqueous phase the detergent phase was resuspended to the original reaction volume with Buffer A. The total, detergent, and aqueous samples were then analyzed by SDS-PAGE.

[0616] Protein characterization: Proteins-lipopeptide conjugates were characterized by SDS-PAGE. Samples(typically 5 μg) were diluted in SDS-PAGE sample buffer (0.1M Tris, pH 8.0/4% SDS/25% glycerol/0.1M DTT). The samples were boiled for 5 minutes and loaded onto a 10% SDS polyacrylamide gel. Following electrophoresis, gels were stained with coomassie blue to visualize protein bands.

### Results and Discussion

[0617] Input HA1-1His₆(PR8)Bv (SEQ ID NO: 179) runs as a doublet band on SDS-PAGE. This has been seen for all of the HA1-1His₆ proteins made in Baculovirus to date and is likely due to differences in glycosylation. HA1-1His₆(PR8)Bv (SEQ ID NO: 179) which has been derivatized with Sulfo-SMCC but not conjugated to lipopeptide stays in the aqueous phase during TX-114 separation, the expected behavior for a soluble, globular protein. HA1-1His₆(PR8)Bv (SEQ ID NO: 179) conjugated to Pam₃Cys shows 3 or 4 bands of higher molecular weight than the derivatized input protein, consistent with covalent modification by the lipopeptide. On TX-114 phase separation the higher mw species segregate primarily into the detergent phase while the lower species (corresponding to the unmodified protein) stay in the aqueous phase. This behavior is consistent with the commonly observed segregation of lipoproteins into detergent droplets and confirms that HA1-1His₆(PR8)Bv (SEQ ID NO: 179) has been covalently modified with the Pam₃CS(K)₄GC (SEQ ID NO: 335) lipopeptide. The higher molecular-weight bands of approximately 60, 120, and 180 kDa, which are seen in the SMCC-derivatized protein but not in the input, are covalent HA1-1 multimers formed by the crosslinker. This multimerization would be prevented, and the yield of singly lipidated HA1-1 improved, by engineering a single cysteine into HA1-1 and using a cysteine-specific rather than a lysine-specific crosslinker. Such a strategy would also give better control over the site of attachment of the lipopeptide on HA1-1, giving a more homogeneous product and possibly improving immunogenicity. Flagellin and modified flagellins with cysteines and nucleic acids encoding the modified flagellin can include SEQ ID NOs: 312, 313, 325, 326 and 331-334.

### Example 14

### Cloning and Expression of STF2.4×H1C1, a Fusion Protein Comprising Flagellin (TLR5Agonist) and the Maturational Cleavage Site Peptide of Influenza a Hemagglutinin

### Materials and Methods

[0618] Construct design: To facilitate cloning of target genes in fusion with flagellin, a cassette plasmid containing a unique BlpI site at the 3′ end of the flagellin gene was used (STF2.blp, SEQ ID NO: 340). This cassette was made by introducing a silent mutation (5′-GTGCTGAGCCTGTTACGT-3′) at nucleotides 1501 to 1518 of STF2, creating the unique BlpI site in the plasmid cassette, pET24/STF2.blp (SEQ ID NO: 340). Synthetic genes encoding one, two, three and four copies of the maturational cleavage site fragment (H1C1) of influenza A subtype H1 (NIPSIQSRGLFGAIAGFIE; SEQ ID NO: 341) were codon-optimized for E. coli expression and obtained from a commercial vendor (DNA2.0 Inc., Menlo Park, Calif.). The synthetic genes were excised with BlpI enzyme and ligated by compatible ends to pET24/STF2.blp which had been treated with BlpI and bacterial alkaline phosphatase (BAP). These constructs were designated as STF2.1×H1C1, STF2.2×H1C1, STF2.3×H1C1 and STF2.4×H1C1 respectively (SEQ ID NO: 342; SEQ ID NO: 343; SEQ ID NO: 344; SEQ ID NO: 345).

[0619] Similarly, a fusion gene constructed to contain the H1C1 sequence and flanked by a pair of cysteines to facilitate loop formation of the concatemers was designated as STF2.4×H1C2 (SEQ ID NO: 346). A similar approach was employed to generate a construct harboring four tandem copies of the cleavage fragment of influenza A subtype H5 (RERRRKKRGLFGAIAGFIE; SEQ ID NO: 347) designated as construct STF2.4×H5C1 (SEQ ID NO: 348). The consensus cleavage fragments representing subtypes H3 (NVPEKQTRGIFGAIAGFIE; SEQ ID NO: 349), H2 (NVPQIESRGLFGAIAGFIE; SEQ ID NO: 350) and the B-strain, B/HA (PAKLLKERGFFGAIAGFLE; SEQ ID NO: 351) are thus amenable to this experimental approach as outlined above. In each case, the constructed plasmids were used to transform competent E. coli TOP10 cells and putative recombinants were identified by PCR screening and restriction mapping analysis.

[0620] The integrity of the constructs was verified by DNA sequencing and they were used to transform the expression host, BLR3 (DE3) (Novagen, San Diego, Calif.; Cat #69053). Transformants were selected on plates containing kanamycin (50 μg/mL), tetracycline (5 μg/mL) and glucose (0.5%). Colonies were picked and inoculated into 2 ml of LB medium supplemented with 25 μg/ml kanamycin, 12.5 μg/ml tetracycline and 0.5% glucose and grown overnight. Aliquots of these cultures were used to inoculate fresh cultures in the same medium formulation, which were cultured until they reached an OD₆₀₀=0.6, at which time protein expression was induced by the addition of 1 mM IPTG and culturing for 3 hours at 37° C. The cells were harvested and analyzed for protein expression.

[0621] SDS-PAGE and Western blot: Protein expression and identity were determined by gel electrophoresis and immunoblot analysis. Cells were harvested by centrifugation and lysed in Laemmli buffer. An aliquot of 10 μl of each lysate was diluted in SDS-PAGE sample buffer with or without 100 mM DTT as a reductant. The samples were boiled for 5 minutes and loaded onto a 10% SDS polyacrylamide gel and electrophoresed (SDS-PAGE). The gel was stained with Coomassie R-250 (Bio-Rad; Hercules, Calif.) to visualize protein bands. For western blot, 0.5 μl/lane cell lysate was electrophoresed and electrotransfered to a PVDF membrane and blocked with 5% (w/v) dry milk. The membrane was probed with anti-flagellin antibody 6H11 (Inotek; Beverly, Mass.) After probing with alkaline phosophatase-conjugated secondary antibodies (Pierce; Rockland, Ill.), protein bands were visualized with an alkaline phosphatase chromogenic substrate (Promega, Madison, Wis.). Bacterial clones which yielded protein bands of the correct molecular weight and reactive with the appropriate antibodies were selected for production of protein for use in biological assays.

### Results and Discussion

[0622] Cloning and expression of cleavage site constructs: The maturational cleavage site fragment of hemagglutinin precursor is well-conserved across subtypes of influenza strains A and B, and could therefore be a target for the development of a universal vaccine effective against most circulating strains of influenza. A series of plasmids encoding a fusion of the TLR5 ligand with cleavage fragment was generated and expressed in E. coli strain BLR(DE3). As assayed by Coomassie blue staining of the SDS-PAGE gel and confirmed by immunoblot assays, the E. coli strains harboring the constructs STF2.1×H1C1, STF2.2×H1C1, STF2.3×H1C1, and STF2.4×H1C1 displayed bands that correspond to the predicted molecular weights of 55, 58, 60 and 62 kDa respectively. Similarly, BLR(DE3) strains expressing the constructs STF2.4×H1C2 and STF2.4×H5C1 display recombinant fusion proteins migrating with the apparent molecular weight of 62 Kda and 66 Kda respectively. These data indicate that a fusion of flagellin and cleavage fragment of HA is abundantly expressed in E coli.

### Expression and Purification of STF2.4×H1C1, a Fusion Protein Comprising Flagellin (TLR5Agonist) and the Maturational Cleavage Site Peptide of Influenza a Hemagglutinin

### Materials and Methods

[0623] Bacterial cell growth and cell lysis: The STF2.4×H1C1 (SEQ ID NO: 345) construct was expressed in the E. coli host strain BLR(DE3). The strain was retrieved from a glycerol stock and grown in shake flasks to a final volume of 12 L. Cells were grown in LB medium containing 50 μg/ml kanamycin, 12.5 μg/ml tetracycline, 0.5% dextrose to OD₆₀₀=0.6 and induced with 1 mM IPTG for 3 h at 37° C. The cells were harvested by centrifugation (7000 rpm×7 minutes in a Sorvall RC5C centrifuge) and resuspended in 20 mM Tris-HCl, pH 8.0, 1 μg/ml DNAseI, 1 mM PMSF, protease inhibitor cocktail and 1 mg/ml lysozyme. The cells were then lysed by two passes through a microfluidizer (Microfluidics; Newton, Mass.) at 15,000 psi. The lysate was centrifuged at 45,000 g for one hour in a Beckman Optima L ultracentrifuge (Beckman Coulter; Fullerton, Calif.) to separate the soluble and insoluble fractions.

[0624] Purification of STF2.4×H1C1 (SEQ ID NO: 345): After centrifugation, the supernatant fraction was collected and passed through a Q sepharose Fast Flow column (GE/Amersham Biosciences; Piscataway, N.J.). The flow-through fraction from this step was supplemented with Triton X-100 (Sigma; St. Louis, Mo.) to a final concentration of 1% (w/v) and passed through the same Q sepharose column. The flow through fraction was collected again and supplemented with urea to a final concentration of 8 M and citric acid to a final concentration of 20 mM. After adjusting the pH to 3.5 with concentrated HCl, the solution was passed over a Source S column (GE/Amersham Biosciences; Piscataway, N.J.) equilibrated with 20 mM citric acid, pH 3.5.

[0625] The column was then washed with 10 column volumes of equilibration buffer supplemented with 1% (w/v) Triton X-100 to remove endotoxin. The protein was then eluted in a 5-column volume linear gradient of 0 to 1 M NaCl in equilibration buffer. The STF2.4×H1C1 was then re-folded by rapid dilution to a final concentration of 0.1 mg/ml protein in refolding buffer [0.1 M Tris-HCl, pH 8.0, 0.1 M NaC, 1% (w/v) glycerol]. The refolded protein was concentrated using a pressurized ultrafiltration stir-cell (Millipore; Billerica, Mass.) and fractionated on a Superdex 200 size-exclusion column (GE/Amersham Biosciences; Piscataway, N.J.).

[0626] SDS-PAGE and Western Blot analysis: Protein identity was determined, and purity estimated, by SDS-PAGE. An aliquot of 5 μg of each sample was diluted in SDS-PAGE sample buffer with or without 100 mM DTT as a reductant. The samples were boiled for 5 minutes and loaded onto a 10% SDS polyacrylamide gel (LifeGels; French's Forrest, New South Wales, AUS) and electrophoresed. The gel was stained with Coomassie R-250 (Bio-Rad; Hercules, Calif.) to visualize protein bands. For western blot, 0.5 μg/lane total protein was electrophoresed as described above and then electro-transfered to a PVDF membrane and blocked with 5% (w/v) dry milk before probing with anti-flagellin antibody (Inotek; Beverly, Mass.) or serum from mice immunized with a synthetic, lipidated H1C1 peptide. After probing with alkaline phosophatase-conjugated secondary antibodies (Pierce; Rockland, Ill.), protein bands were visualized with an alkaline phosphatase chromogenic substrate (Promega; Madison, Wis.).

[0627] Protein assay: Total protein concentration for all proteins was determined using the Micro BCA (bicinchoninic acid) Assay (Pierce; Rockford Ill.) in the microplate format, using bovine serum albumin as a standard, according to the manufacturer's instructions.

[0628] Endotoxin assay: Endotoxin levels for all proteins were determined using the QCL-1000 Quantitative Chromogenic LAL test kit (Cambrex; E. Rutherford, N.J.), following the manufacturer's instructions for the microplate method.

[0629] TLR5 bioactivity assay: HEK293 cells constitutively express TLR5, and secrete several soluble factors, including IL-8, in response to TLR5 signaling. Cells were seeded in 96-well microplates (50,000 cells/well), and the STF2.4×H1C1 test protein was added. The next day, the conditioned medium was harvested, transferred to a clean 96-well microplate, and frozen at −20° C. After thawing, the conditioned medium was assayed for the presence of IL-8 in a sandwich ELISA using an anti-human IL-8 matched antibody pair (Pierce, Rockland, Ill.; #M801E and #M802B) following the manufacturer's instructions. Optical density was measured using a microplate spectrophotometer (FARCyte, GE/Amersham; Piscataway, N.J.).

### Results and Discussion

[0630] The purified and refolded STF2.4×H1C1 protein (SEQ ID NO: 345) was found to be substantially aggregated as the majority of the protein fractionated in the void volume of the Superdex 5200 column (FIG. 26). The protein also had poor in vitro TLR5 activity, with an EC₅₀ value approximately two orders of magnitude higher than the standard flagellin fusion protein STF2.OVA. The purified protein reacted with serum from mice immunized with a synthetic, lipidated H1C1 peptide.

### Expression and Purification of STF2.1×H1C1, a Fusion Protein Comprising Flagellin (TLR5Agonist) and the Maturational Cleavage Site Peptide of Influenza a Hemagglutinin

### Materials and Methods

[0631] Bacterial cell growth and cell lysis: The STF2.1×H1C1 (SEQ ID NO: 355) construct was expressed in the E. coli host strain BLR(DE3). The strain was retrieved from a glycerol stock and grown in shake flasks to a final volume of 12 L. Cells were grown in LB medium containing 50 μg/ml kanamycin/12.5 μg/ml tetracycline/0.5% dextrose to OD₆₀₀=0.6 and induced with 1 mM IPTG for 3 hours at 37° C. The cells were harvested by centrifugation (7000 rpm×7 minutes in a Sorvall RC5C centrifuge) and resuspended in 20 mM Tris-HCl, pH 8.0, 1 μg/ml DNAseI, 1 mM PMSF, protease inhibitor cocktail and 1 mg/ml lysozyme. The cells were then lysed by two passes through a microfluidizer (Microfluidics; Newton, Mass.) at 15,000 psi. The lysate was centrifuged at 45,000 g for one hour in a Beckman Optima L ultracentrifuge (Beckman Coulter; Fullerton, Calif.) to separate the soluble and insoluble fractions.

[0632] Purification of STF2.1×H1C1 (SEQ ID NO: 342): After centrifugation, the supernatant fraction was collected and passed through a Q sepharose Fast Flow column (GE/Amersham Biosciences; Piscataway, N.J.). The flow-through fraction from this step was supplemented with Triton X-100 (Sigma; St. Louis, Mo.) to a final concentration of 1% (w/v) and passed through the same Q sepharose column. The flow-through fraction was collected again and supplemented with urea to a final concentration of 8 M and citric acid to a final concentration of 20 mM. After adjusting the pH to 3.5 with concentrated HCl, the solution was passed over a Source S column (GE/Amersham Biosciences; Piscataway, N.J.) equilibrated with 20 mM citric acid, pH 3.5.

[0633] The column was then washed with 10 column volumes of equilibration buffer supplemented with 1% (w/v) Triton X-100 to remove endotoxin. The protein was then eluted in a 5-column volume linear gradient of 0 to 1 M NaCl in equilibration buffer. The STF2.1×H1C1 was re-folded by rapid dilution to a final concentration of 0.1 mg/ml protein in refolding buffer [0.1M Tris-HCl, pH 8.0/0.1M NaCl/1% (w/v) glycerol]. The refolded protein was concentrated using a pressurized ultrafiltration stir-cell (Millipore; Billerica, Mass.) and fractionated on a Superdex 200 size-exclusion column (GE/Amersham Biosciences; Piscataway, N.J.).

[0634] SDS-PAGE and western blot analysis: Protein identity was determined, and purity estimated, by SDS-PAGE. An aliquot of 5 μg of each sample was diluted in SDS-PAGE sample buffer with or without 100 mM DTT as a reductant. The samples were boiled for 5 minutes and loaded onto a 10% SDS polyacrylamide gel (LifeGels; French's Forrest, New South Wales, AUS) and electrophoresed. The gel was stained with Coomassie R-250 (Bio-Rad; Hercules, Calif.) to visualize protein bands. For western blot, 0.5 μg/lane total protein was electrophoresed as described above and the gels were then electro-transfered to a PVDF membrane and blocked with 5% (w/v) dry milk before probing with anti-flagellin antibody (Inotek; Beverly, Mass.) or serum from mice immunized with a Pam3Cys.H1C1 peptide (SEQ ID NO: 358). After probing with alkaline phosophatase-conjugated secondary antibodies (Pierce; Rockland, Ill.), protein bands were visualized with an alkaline phosphatase chromogenic substrate (Promega; Madison, Wis.).

### Results and Discussion

[0635] The purified and refolded STF2.1×H1C1 protein (SEQ ID NO: 342) was found to be monomeric as judged by the elution profile on a Superdex 200 gel filtration column. The majority of the protein was found in the included volume with the major peak eluting at approximately 14 mls. This corresponds very closely with the known elution profile of purified, monomeric flagellin on this column. Almost no protein was seen eluting in the void volume, known to be approximately 7 mls for this column, demonstrating that virtually no aggregates are present.

### Immunogenicity and Efficacy of Pam3Cys.H1C1, a Fusion Peptide Comprising Pam3Cys (TLR2Agonist) and the Maturational Cleavage Site Peptide of Influenza a Hemagglutinin

### Materials and Methods

[0636] Peptide design and synthesis: Pam3 (tri-palmoytyl) is the natural ligand for Toll-like Receptor 2 (TLR2), and it is natively expressed as the lipidation motif of bacterial lipoprotein (BLP, SEQ ID NO: 357). Pam3 can be made by chemical synthesis and conjugated to macromolecules such as proteins or coupled to the N-terminus of synthetic peptides using standard peptide synthesis chemistry. This strategy usually involves the synthesis of a peptide of interest concluded by the coupling of Pam3-modified cysteine (Pam3Cys) to the amino terminus to yield the lipopeptide of interest. This approach was used to synthesize a lipidated HA cleavage fragment peptide, Pam3Cys.H1C1 (Pam3Cys-SLWSEENIPSIQSRGLFGAIAGFIEE, SEQ ID NO: 358).

[0637] Mice and immunization: Female BALB/c mice (Jackson Laboratory, Bar Harbor, Me.) were used at the age of 6-8 weeks. Mice were divided into groups of 10 and received inguinal subcutaneous (s.c) immunizations on days 0 and 14 as follows:
[0638] 8) PBS (phosphate buffered saline).
[0639] 9) 20 μg of H1C1 native peptide (SEQ ID NO: 358) in saline buffer (10 mM Histidine, 10 mM Tris, 75 mM NaCl, 5% (vol/vol) sucrose, 0.02% (w/v) Polysorbate-80, 0.1 mM EDTA, 0.5% (v/v) ethanol, pH 7.2)
[0640] 10) 20 μg of Pam3Cys.H1C1 peptide (SEQ ID NO: 358) in saline buffer

[0641] An additional group of five mice received an experimentally determined sublethal challenge with 8×10¹ egg infectious dosages (EID) PR/8/34 and were allowed to convalesce for >21 days. These animals were then used as immune convalescent positive controls during the challenge studies. Mice were bled on days 10 (primary) and 21 (boost), and sera were clarified by clotting and centrifugation and stored at −20° C.

[0642] Serum antibody determination: H1C1-specific IgG levels were determined by ELISA. 96-well ELISA plates (Costar (Cat #9018) Corning, N.Y.) were coated overnight at 4° C. with 100 μl/well H1C1 peptide (SEQ ID NO: 358) in PBS (5 μg/ml). Plates were blocked with 200 μl/well of Assay Diluent Buffer (ADB; BD Pharmingen, (Cat#: 555213) (San Diego, Calif.) for one hour at room temperature. The plates were washed three times in PBS+0.05% (v/v) Tween 20 (PBS-T). Dilutions of the sera in ADB were added (100 μl/well) and the plates were incubated overnight at 4° C. The plates were washed three times with PBS-T. HRP-labeled goat anti-mouse IgG antibodies (Jackson Immunochemical, West Grove, Pa. (Cat#: 115-035-146)) diluted in ADB were added (100 μl/well) and the plates were incubated at room temperature for 1 hour. The plates were washed three times with PBS-T. After adding TMB Ultra substrate (Pierce (Cat 34028), Rockford, Ill.)) and monitoring color development, A₄₅₀ was measured on a Tecan Farcyte (Durham, N.C.) microplate spectrophotometer.

[0643] Influenza virus challenge of mice. To assess efficacy, mice immunized as described above were challenged on day 28 by intranasal administration of an LD₉₀ (dose lethal to 90% of mice) (8×10³ EID) of influenza A isolate PR/8/34. Animals were monitored daily for 21 days following the challenge for survival, weight loss and clinical presentation. The % weight loss was calculated based on the mean of ((Daily weight (g)/Initial weight (g) day 28)×100) of each individual animal per group. Clinical scores were assigned as follows: 4 pts=healthy, 3 pts=reduced grooming, 2 pts=reduced physical activity and 1 pt=moribund. (Experimental results for clinical scores and weight loss reflect the results based on surviving animals on the day evaluated).

### Results and Discussion

[0644] Induction of H1C1-specific antibody responses following immunization with Pam3Cys.H1C1: Mice were immunized with native H1C1 peptide (SEQ ID NO: 358) and the same peptide modified by the addition of an amino terminal Pam3Cys residue, to test the hypothesis that linkage of the peptide to a TLR2 ligand would increase its immunogenicity. Immunogenicity was determined by measuring levels of antibodies to native H1C1 (SEQ ID NO: 358) in the sera of the immunized mice. The results show clearly that mice immunized with the Pam3Cys-modified peptide generated higher antibody titers to the immunizing peptide backbone sequence than did mice immunized with the native peptide (SEQ ID NO: 358) (FIG. 27).

[0645] Protection from lethal influenza virus challenge following immunization with Pam3Cys.H1C1. The results in FIG. 27 demonstrated that immunization of mice with Pam3Cys.H1C1 generated an antibody response that recognized native H1C1 peptide. In order to evaluate efficacy, the same mice were challenged on day 28 with an LD₉₀ (8×10³EID) of PR/8/34 virus administered intra-nasally. Mice were monitored daily for 21 days following the challenge for survival, weight loss and clinical presentation. As shown in FIG. 28, PBS-immunized mice died between 6 and 10 days post-challenge, while convalescent mice survived beyond the 21-day observation period. Mice immunized with native H1C1 (SEQ ID NO: 358) began to die by day 6 post-infection at a rate similar to the PBS control mice, although 2 of the 10 mice survived beyond the 21-day observation period. In contrast, and similar to the convalescent mice, all mice immunized with Pam3Cys.H1C1 survived beyond the 21-day observation period. Thus, while H1C1 alone is not potently immunogenic (FIG. 27) nor protective (FIG. 28), the same sequence coupled to a TLR2 ligand is both immunogenic and protective.

### Example 15

### Flagellin-M2e Fusion Proteins

[0646] M2e is conserved across multiple influenza A subtypes (also referred to herein as “strain”). M2e is at least a portion of the M2 protein, in particular, a 24 amino-terminus (also referred to herein as an “ectodomain”) of the M2 protein. The M2 ectodomain is relatively small amino acid sequence (24 amino acids) compared to HA (about 566 amino acids) and NA (about 469 amino acids). The M2e sequence of exemplary avian influenza A isolates differs from that of human isolates, but is highly-conserved among the avian isolates (see, for example, SEQ ID NOS: 543-555, 569 and 572-577). Four tandem copies of M2e fused to the carboxy terminus of a flagellin STF2 (full-length or STF2 hinge region-deleted) were generated. The STF2 without the hinge region is also referred to herein as “STF2Δ.”

### Construction of Fusion Protein

[0647] The carboxy-terminal fusion of the synthetic 4×M2e sequence (4 consecutive 24 amino acid sequences) with STF2 was constructed as follows. The pET24A vector was purchased from Novagen, San Diego, Calif. The strategy employed the Seamless Cloning Kit (Catalog number 214400) from Stratagene (La Jolla, Calif. www.stratagene.com) performed by DNA 2.0 Inc. (Menlo Park, Calif.). The gene encoding the fusion protein was in pDrive 4×M2e G00448 and was used as a PCR template for insert preparation for construction of the C-terminal fusion expression construct with STF2. The synthetic 4×M2e construct pDrive 4×M2e G00448 was used as a template for PCR as outlined in the Seamless Cloning Kit (Catalog number 214400) from Stratagene (La Jolla, Calif.). The expected product from this amplification includes the 318 bp and the restriction enzyme sites incorporated into the oligonucleotides used to amplify this insert. The procedure was as follows:

PCR conditions
1 μL-20 ng of pDrive 4×M2e G00448
5 μL of 10× cloned Pfu polymerase buffer
1 μL of 40 mM dNTP mix
1 μL-10 pmol of forward primer 4×M2eforbs1
1 μL-10 pmol of reverse primer 4×M2erevwsto
40 μL ddH₂O

[0648] Immediately before starting the thermal cycling 1 μL of PfuTurbo DNA Polymerase the following were added.

4xM2eforbs1 primer sequence:
(SEQ ID NO: 565)
5′-CGCTCTTCAMTGAGCTTGCTGACTGAGGTTGAGACCCCGATTC
4xM2erevwsto primer sequence:
(SEQ ID NO: 566)
5′-CGCTCTTCACGCTTATTATCTAGACGGGTCTGAGCTATCGTTAGAG
CGAG

[0649] This reaction was cycled as follows on a Thermo Hybaid P×E thermal cycler (Waltham, Mass.).

[0650] Initial Cycle

| Temperature | Duration | |
|---|---|---|
| 95° | 3 | minutes |
| 65° | 1 | minute |
| 72° | 1 | minute |

[0651] Subsequent Nine Cycles

| Temperature | Duration | |
|---|---|---|
| 95° | 45 | seconds |
| 65° | 35 | seconds |
| 72° | 1 | minute |

[0652] At this point the following was added to each reaction.

5 μL of 10× cloned Pfu polymerase buffer
1 μL of 5-methyl dNTP mix
44 μL ddH₂O

[0653] Subsequently the following thermal cycling was repeated five times.

| Temperature | Duration | |
|---|---|---|
| 95° | 45 | seconds |
| 65° | 35 | seconds |
| 72° | 1 | minute |

[0654] The 100 μL product was brought to a volume of 300 μL by the addition of TE buffer. The resulting product was phenol chloroform (Invitrogen Carlsbad, Calif.-Catalog number 15593-031) extracted once and chloroform extracted once. The amplification product was then ethanol precipitated by addition of 30 μL of Sodium acetate buffer pH 5.2 and 750 μL of 100% Ethanol. The DNA pellet was washed twice with 300 μL 70% Ethanol allowed to air dry for ten minutes and then resuspended in 50 μL TE buffer.

Amplification of Vector STF2 in pET24.

[0655] The previously constructed pET24a/STF2.M2e construct was used as a template for PCR as outlined in the Seamless Cloning Kit (Catalog number 214400) from Stratagene (La Jolla, Calif.). The expected product from this amplification includes the whole of the pET24 plasmid plus the STF2 sequences but does not include the single copy of M2E that exists in this construct. The procedure was as follow:

### PCR Conditions

[0656] 1 μL-40 ng of STF2.M2E pET22-2
5 μL of 10× cloned Pfu polymerase buffer
1 μL of 40 mM dNTP mix
1 μL-10 μmol of primer 4×MECpET24
1 μL-10 μmol of primer 4×M2eC-STF2
40 μL ddH₂O

[0657] Immediately before starting the thermal cycling the following were added:

### 1 μL of PfuTurbo DNA Polymerase

4xMECpET24 primer sequence:

(SEQ ID NO: 567)

5′-GCTCTTCAGCGGCTGAGCAATAACTAGCATAACCCCTTGGG
4xM2eC-STF2 primer sequence:

(SEQ ID NO: 568)

5′-CGCTCTTCACAGACGTAACAGAGACAGCACGTTCTGCGG

[0659] This reaction was cycled as follows on a Thermo Hybaid P×E thermal cycler (Waltham, Mass.).

[0660] Initial Cycle

| Temperature | Duration | |
|---|---|---|
| 95° | 3 | minutes |
| 65° | 1 | minute |
| 72° | 18 | minutes |

[0661] Subsequent Nine Cycles

| Temperature | Duration | |
|---|---|---|
| 95° | 45 | seconds |
| 65° | 35 | seconds |
| 72° | 18 | minutes |

[0662] At this point the following was added to each reaction.

5 μL of 10× cloned Pfu polymerase buffer
1 μL of 5-methyl dNTP mix
44 μL ddH₂O

[0663] Subsequently the following thermal cycling was repeated five times.

| Temperature | Duration | |
|---|---|---|
| 95° | 45 | seconds |
| 65° | 35 | seconds |
| 72° | 18 | minutes |

[0664] The 100 μL product was brought to a volume of 300 μL by the addition of TE buffer. The resulting product was phenol chloroform (Invitrogen Carlsbad, Calif.-Catalog number 15593-031) extracted once and chloroform extracted once. The amplification product was then ethanol precipitated by addition of 30 μL of Sodium acetate buffer pH 5.2 and 750 μL of 100% Ethanol. The DNA pellet was washed twice with 300 μL 70% Ethanol allowed to air dry for ten minutes and then resuspended in 50 μL TE buffer.

### Digestion and Ligation of Vector and Insert Amplifications

[0665] Eam 1104 I digests were set up separately for vector and insert as follows:

[0666] 30 μL of amplified product after ethanol precipitation

[0667] 5 μL of 10× Universal buffer (Supplied with Seamless Cloning Kit)

[0668] 4 μL Eam 1104 I restriction enzyme (Supplied with Seamless Cloning Kit)

[0669] 11 μL ddH₂O

[0670] Digests were mixed gently and incubated at 37° C. for one hour and ligation reactions of vector and insert products were prepared as above performed as follows (Reagents supplied with Seamless Cloning Kit):

[0671] Ingredients added in order listed:

[0672] 9 μL ddH₂O

[0673] 5 μL of Eam 1104 I digested 4×M2e amplified insert

[0674] 5 μL of Eam 1104 I digested STF2.M2E pET22-2 amplified vector

[0675] 2 μL 10× Ligase buffer

[0676] 2 μL 10 mM rATP

[0677] 1 μL T4 DNA Ligase (diluted from stock 1:16)

[0678] 1 μL Eam 1104 I restriction enzyme

[0679] The ligation reactions were mixed gently and incubated for 30 minutes at 37° C. The ligations were then stored on ice until transformed into XL-10 competent cells (Stratagene Catalog number 200314) later than same day.

Transformation of Ligation into XL-10 Competent Cells

[0680] Eppendorf tubes were chilled for ten minutes while the XL-10 (Stratagene Catalog number 200314) competent cells thawed on ice.

[0681] 50 μL of competent cells were aliquoted from the stock tube per ligation.

[0682] 2 μL of β-mercaptoethanol stock which is provided with the XL-10 cells.

[0683] This mixture was incubated for ten minutes on ice gently mixing every 2 minutes. Seamless cloning ligation reaction (4 μl) was added, swirled gently and then incubated on ice for 30 minutes. The tubes were heat shocked for 35 seconds at 42° C. in a water bath. The tubes were incubated on ice for at least two minutes. SOC medium (400 μL) were added to the cells and incubated for one hour at 37° C. with agitation.

[0684] Two LB agar kanamycin (50 μg/mL) plates are used to plate 200 μL and 10 μL of the transformed cells and allowed to grow overnight.

### Screening of Kanamycin Resistant Clones

[0685] Recombinant candidates were grown up for minipreps in Luria Broth containing Kanamycin (25 ug/mL) and extracted using the QIAprep Spin Miniprep Kit (Qiagen Valencia, Calif. Catalog Number 27106). Candidate clones were screened by restriction enzymes (New England Biolabs Beverly, Mass.) and positive clones were grown up in 100 mL of Luria Broth containing kanamycin (25 ug/mL) and extracted using the Qiagen HiSpeed Plasmid Midi Kit (Catalog number 12643). These clones were submitted to GENEWIZ (North Brunswick, N.J.) for sequencing.

### Production and Purification of STF2.4×M2e Fusion Protein

[0686] STF2.4×M2e in E. coli BLR(DE3)pLysS host (Novagen, San Diego, Calif., Catalog #69053) was retrieved from glycerol stock and scaled up to 5 L. Cells were grown in LB medium containing 15 μg/ml Kanamycin and 12.5 μg/ml Teteracycline to OD₆₀₀=0.4 and induced with 1 mM IPTG for 3 h at 37° C. The cells were harvested by centrifugation (7000 rpm×7 minutes in a Sorvall RC5C centrifuge) and resuspended in 2×PBS, 1% glycerol, DNAse, 1 mM PMSF, protease inhibitor cocktail and 1 mg/ml lysozyme. The suspension was passed through a microfluidizer to lyse the cells. The lysate was centrifuged (45,000 g for one hour in a Beckman Optima L ultracentrifuge) to separate the soluble fraction from inclusion bodies. Protein was detected by SDS-PAGE in the soluble and insoluble fractions.

[0687] The soluble fraction was applied to Sepharose Q resin in the presence of high salt via batch method to reduce DNA, endotoxin, and other contaminants. The flow through containing the protein of interest was loaded onto 30 ml Q Sepharose column (Amersham Biosciences). Bound protein was eluted using a linear gradient from Buffer A to B. (Buffer A: 100 mM Tris-C1, pH 8.0. Buffer B: 100 mM Tris-C1, 1 M NaCl, pH 8.0). Eluted protein was further purified using a 45 ml Source Q column that provided greater resolution needed to resolve contaminating proteins. Bound protein was eluted with a linear gradient from Buffer A to B (Buffer A: 100 mM Tris-C1, pH 8.0 Buffer B: 100 mM Tris-C1, 1 M NaCl, pH 8.0).

[0688] Final purification of protein was completed using Superdex-200 gel filtration chromatography. The column was developed with 100 mM Tris, 150 mM NaCl and 1% glycerol plus 1% Na-deoxycholate to remove the LPS. Buffer exchange was carried out using overnight dialysis against buffer containing 50 mM Tris, 100 mM NaCl and 1% glycerol was done to remove Na-deoxycholate. Protein concentration was determined by the MicroBCA Protein Assay Reagent Kit (Pierce Biotechnology). Purified preparations of STF2.4×M2e yielded a single band visible with Coomassie stain that migrated with an apparent molecular weight of about 64 kDa on 12% SDS polyacrylamide gels.

### Example 16

### Expression and Purification of Flagellin (STF2 and STF2Δ) Fusion Protein Constructs Encoding Influenza A M2 Ectodomain Sequences

[0689] The consensus M2e sequences from several influenza A strains of human and avian origin are depicted in SEQ ID NOS: 543-555, 569 and 572-577. To facilitate the cloning of the M2e sequence, two vector cassettes, pMT/STF2 and pMT/STF2Δ, each containing a multiple cloning site (MCS) were generated (See FIGS. 17A and 17B). To generate pMT/STF2, the 1.5 kb gene encoding full length flagellin of Salmonella typhimurium fljb type 2, or STF2, was fused to the Ig binding protein (BIP) secretion signal of pMTBIP/V5-His vector (Invitrogen Corporation, Carlsbad, Calif.) for expression in Drosophila. The BiP sequence is included at the 5′ end of the construct as a secretion signal for expression in Drosophila. A chemically-synthesized 4×M2e gene representing the H1, H2 and H3 consensus sequence, SEQ ID NO: 544, was cloned into the MCS of pMT/STF2 to create pMT/STF2.4×M2e(H1).

[0690] A similar strategy prophetically is employed to clone two H5-associated M2e sequences, SLLTEVETPTRNEWECRCSDSSDP (SEQ ID NO: 552) (A/Viet Nam/1203/2004) and SLLTEVETLTRNGWGCRCSDSSDP (SEQ ID NO: 551) (A/Hong Kong/156/97). Codon-optimized chemically synthesized genes containing four tandemly repeated copies of the indicated H5-associated M2e sequence prophetically are cloned into pMT/STF2 to generate STF2.4×M2e(H5VN) and STF2.4×M2e(H5HK), respectively. To generate a construct that contains multiple M2e forms, the heterologous 4×M2e sequence(s) prophetically are inserted into either of the primary constructs.

[0691] “Heterologous sequences,” as used herein, means sequences from different species. For example, the H1 sequence is a human sequence and the H5 sequence is an avian sequence. Thus, the H1 and H5 sequences are heterologous sequences (e.g., SLLTEVETPTRNEWESRSSDSSDPLESLLTEVETPTRNEWESRSSDSSDPESSLLT EVETPTRNEWESRSSDSSDPGSSLLTEVETPTRNEWESRSSDSSDP (SEQ ID NO: 596), encoded by tctctgctgactgaagtagaaactccaacgcgtaatgaatgggaatcccgttctagcgactcctctgatcctctcgagtccctgct gacggaggttgaaaccccgacccgcaacgagtgggaaagccgttcctccgattcctctgatccggagagcagcctgctgac cgaggtagaaaccccgacccgtaatgagtgggaatctcgctcctctgattcttctgacccgggatcctctctgctgaccgaagt ggagactccgactcgcaacgaatgggagagccgttcttctgactcctctgacccg (SEQ ID NO: 597).

[0692] Primary constructs comprise at least one pathogen-associated molecular pattern (e.g., STF2, STF2Δ) and at least a portion of at least one integral membrane protein (e.g., M2e, such as SEQ ID NOS: 509 and 543). If there is more than one integral membrane in a primary construct, the integral membrane proteins are from the same species.

[0693] A heterologous construct includes at least two integral membrane proteins such as H1 (human) and H5 (avian), for example, in SEQ ID NOS: 582 and 583.

[0694] To generate pMT/STF2Δ, the hyper-variable region that spans amino acids 170 to 415 of the full-length flagellin gene of SEQ ID NO: 498 was deleted and replaced with a short (10 amino acid) flexible linker (GAPVDPASPW, SEQ ID NO: 593) designed to facilitate interactions of the amino and carboxy terminal sequences necessary for TLR5 signaling. The protein expressed from this construct retains potent TLR5 activity whether expressed alone or in fusion with test antigen. Thus, a second series of M2e constructs prophetically is generated based on pMT/STF2Δ. Drosophila Dme1-2 cells (Invitrogen Corporation, Carlsbad, Calif.) grown at room temperature in Schneider's medium supplemented with 10% FBS and antibiotics prophetically is transfected with the constructs described above using Cellfectin reagent (Invitrogen) according to the manufacturer's instructions. Twenty-four hours post transfection, cells prophetically is induced with 0.5 mM CuSO₄ in medium lacking FBS and incubated for an additional 48 hours. Conditioned media (CM) prophetically is harvested from induced cultures and screened for protein expression by SDS-PAGE and Western blot analyses using anti-flagellin and anti-M2e specific antibodies. The identity, TLR bioactivity of the fusion protein, antigenicity assessed by ELISA and in vivo mouse studies for immunogenicity prophetically is performed.

### Example 17

### Construction and Expression of Flagellin-Hemaglutinin (HA) Constructs

[0695] The gene encoding HA from genomic DNA from the in-house laboratory strain PR8, an attenuated derivative of A/Puerto Rico/8/34 was isolated (SEQ ID NO: 564, encoding SEQ ID NO: 563). The gene was fused to the STF2Δ cassette that has been previously constructed in pPICZΔ generating STF2Δ.HAPR8 (SEQ ID NO: 560, encoding SEQ ID NO: 558) (See FIG. 42). Purified recombinant protein was tested for immunogenicity and efficacy in BALB/c mice. The gene encoding H5N1 of the A/Vietnam/1203/04 strain was custom synthesized and fused to STF2Δ cassette generating STF2Δ.HAH5 (SEQ ID NO: 557, encoding SEQ ID NO: 556). Both human and avian HA constructs were transformed into Pichia pastoris strains GS115 and X-33 (Invitrogen Corporation, Carlsbad, Calif.). Selected clones were screened for expression by fractionation on SDS-PAGE gel and staining by Coommassie Blue and Western blot analysis using anti-HA and anti-flagellin antibodies.

### Example 18

### Generation of a Pam3Cys Fusion Protein

[0696] M2e (SEQ ID NO: 543) was chemically coupled to a tri-palmitoylcysteine (Pam3Cys) moiety through the amino terminal serine residue of the peptide. The structure of the fusion protein (Pam3Cys.M2e) is shown in FIG. 39. The chemical name for Pam3Cys.M2e is [Palmitoyl-Cys((RS)-2,3-di(palmitoyloxy)-propyl)-Ser-Leu-Leu-Thr-Glu-Val-Glu-Thr-Pro-Ile-Arg-Asn-Glu-Trp-Gly-Ser-Arg-Ser-Asn-Asp-Ser-Ser-Asp-Pro-OH acetate salt]. The molecular mass of Pam3Cys.M2e is 3582.3 daltons.

[0697] Pam3Cys.M2e was synthesized using a solid phase peptide synthesis methodology based on a well established Fmoc-strategy (Houben-Weyl, 2004. Synthesis of peptides and peptidomimetics, Vol. 22, Georg Thieme Verlag Stuttgart, N.Y.). The synthetic scheme and manufacturing process for Pam3Cys.M2e is diagrammed in the flow chart below. The Pam3Cys.M2e is a fusion protein (chemically linked) and is also referred to herein as a “lipidated peptide.”

[0698] The first step in the synthesis included solid phase peptide synthesis. The amino acid sequence of Pam3Cys.M2e was assembled on an H-Pro-2-chlorotrityl chloride resin by solid phase peptide synthesis. This resin is highly suitable for the formation of peptides with the Fmoc-strategy. The peptide chain was elongated by successive coupling of the amino acid derivatives. Each coupling step was preceded by an Fmoc-deprotection step and both steps were accompanied by repeated washing of the resin. After coupling of the last amino acid derivative, the final Fmoc-deprotection step was performed. Finally, the peptide resin was washed and dried under reduced pressure. During solid phase peptide synthesis color indicator tests were performed for each step to monitor the completion of the Fmoc-cleavage and the subsequent coupling of the amino acid derivatives.

[0699] Stage 2 of the synthesis included coupling of Pam3Cys-OH. Pam3Cys-OH was pre-activated with N,N′-dicyclohexyl-carbodiimide (DCCI) in the presence of 1-hydroxybenzotriazole (HOBt). The resulting solution was filtered and added to the peptide resin. At the end of the reaction time the peptide resin was washed and dried under reduced pressure. Color indicator tests were performed to control the coupling of Pam3Cys-OH.

[0700] Stage 3 of the synthesis included cleavage from the resin including cleavage of the side chain protecting groups. The peptide resin was treated with trifluoroacetic acid (TFA). The product was precipitated from the reaction mixture and lyophilized.

[0701] Stage 4 of the synthesis included purification by preparative reverse phase HPLC. The crude material obtained from Stage 3 was purified by preparative HPLC on a reverse phase column using a TFA system. The fractions were collected, checked by analytical HPLC and pooled accordingly. Pooled fractions from the TFA runs were lyophilized.

[0702] Stage 5 of the synthesis included precipitation in the presence of EDTA. The purified material from Stage 4 was precipitated from an aqueous solution of EDTA. The product was filtered off and dried under reduced pressure.

[0703] Stage 6 of the synthesis included ion exchange chromatography. The last stage of manufacturing Pam3Cys.M2e was the exchange from the trifluoroacetate salt into the acetate salt by ion exchange. The material from Stage 5 was loaded onto an ion exchange column and eluted with acetic acid. Fractions were checked by thin layer chromatography and the combined product-containing fractions were filtered and lyophilized to yield the final product.

[chemical structure]

[0704] The purity specification for the Pam3Cys.M2e drug substance was ≧80% by RP-HPLC. The specification was based on the purity achieved with three non-GMP lots of Pam3Cys.M2e made from the same GMP batch of M2e-peptide intermediate resin. The purity of the three non-GMP lots of Pam3Cys.M2e was 80.2%, 80.3% and 80.8%, for lots D.001.Pam3Cys.M2e, D.002.Pam3Cys.M2e and D.003.Pam3Cys.M2e, respectively.

### Example 19

### Immunogenicity

### Materials and Methods

### Synthesis and Purification of Pam3Cys.M2E

[0705] Pam3Cys.M2e was prepared by Genemed Synthesis and Bachem using solid phase synthesis methodologies and FMOC chemistry as described above. Mass spectroscopy analysis was used to verify the molecular weight of the final product.

### Endotoxin Assay

[0706] Endotoxin levels of the STF2.4×M2e and the Pam3Cys.M2e were measured using the QCL-1000 Quantitative Chromogenic LAL test kit (BioWhittaker #50-648 U), following the manufacturer's instructions for the microplate method.

### TLR5Bioactivity Assay

[0707] HEK293 cells constitutively express TLR5 and secrete several soluble factors, including IL-8, in response to TLR5 signaling. HEK293 cells were seeded in 96-well microplates (50,000 cells/well) and test proteins were added and incubated overnight. The next day, the conditioned medium was harvested, transferred to a clean 96-well microplate and frozen at −20° C. After thawing, the conditioned medium was assayed for the presence of IL-8 in a sandwich ELISA using an anti-human IL-8 matched antibody pair (Pierce, #M801E and #M802B) following the manufacturer's instructions. Optical density was measured using a microplate spectrophotometer (FARCyte, Amersham). Results are reported as pg of IL8 per ml as determined by inclusion of a standard curve for IL8 in the assay.

### TLR2Bioactivity Assay

[0708] RAW264.7 cells (ATCC) express TLR2 and secrete several soluble factors, including TNFα, in response to TLR2 signaling. RAW264.7 cells were seeded in 96-well microplates (50,000 cells/well), test compounds were added and incubated overnight. The next day, the conditioned medium was harvested, transferred to a clean 96-well microplate and frozen at −20° C. After thawing, the conditioned medium was assayed for the presence of TNFα in a sandwich ELISA using an anti-mouse TNFα matched antibody pair (Pierce) following the manufacturer's instructions. Optical density was measured using a microplate spectrophotometer (FARCyte, Amersham). Results are reported as ng of TNF per ml as determined by reference to a standard curve for TNF included in the assay.

### Mouse Immunogenicity

[0709] Female BALB/c mice (National Cancer Institute) were used at the age of about 6-8 weeks. Mice were divided into groups of 5 to 10 mice per group, and immunized subcutaneously on each side of the base of the tail on days 0 and 21 with the indicated concentrations of STF2.4×M2e or Pam3Cys.M2e fusion protein. On days 10 (primary) and 28 (boost), individual mice were bled by retro-orbital puncture. Sera were harvested by clotting and centrifugation of the heparin-free blood samples.

### Mouse Serum Antibody Determination

[0710] M2e-specific IgG levels were determined by ELISA. 96-well ELISA plates were coated overnight at 4° C. with 100 μl/well of a 5 μg/ml solution of the M2e peptide in PBS. Plates were blocked with 200 μl/well of Assay Diluent Buffer (ADB; BD Pharmingen) for one hour at room temperature. The plates were washed three times in PBS containing 0.05% Tween-20 (PBS-T). Dilutions of the sera in ADB were added (100 μl/well) and the plates were incubated overnight at 4° C. The plates were washed three times with PBS-T. Horse radish peroxidase, or HRP-labeled goat anti-mouse IgG antibodies (Jackson Immunochemical) diluted in ADB were added (100 μl/well) and the plates were incubated at room temperature for 1 hour. The plates were washed three times with PBS-T. After adding TMB Ultra substrate (3,3′,5,5′-tetramentylbenzidine; Pierce) and monitoring color development, the O.D. 450 was measured on a Tecan Farcyte microspectrophotometer.

### Rabbit Immunogenicity

[0711] Female and male NZW rabbits (Covance Research Products) were used at the age of about 13-17 weeks. Rabbits were divided into groups of 3 male and 3 female per group, and immunized i.m. on alternating thighs on days 0 and 21 and 42 with the indicated concentrations of Pam3Cys.M2e peptide or STF2.4×M2e fusion protein. Animals were bled on day −1 (prebleed), 14 (primary) and 28 and 42 (boost). Sera were prepared by clotting and centrifugation of samples.

### Rabbit Serum Antibody Determination

[0712] M2e-specific IgG levels were determined by ELISA. 96-well ELISA plates were coated overnight at about 4° C. with 100 μl/well M2e peptide in PBS (5 μg/ml). Plates were blocked with 200 μl/well of Assay Diluent Buffer (ADB; BD Pharmingen) for one hour at room temperature. The plates were washed three times in PBS-T. Dilutions of the sera in ADB were added (100 μl/well) and the plates were incubated overnight at about 4° C. The plates were washed 3× with PBS-T. Bound IgG was detected using HRP-conjugated goat anti-rabbit IgG (Jackson Immunochemical). The plates were washed three times with PBS-T. After adding TMB Ultra substrate (Pierce) and monitoring color development, O.D. 450 was measured on a Molecular Devices Spectramax microspectrophotometer. Results are reported as the Delta O.D. which is determined by subtracting the O.D. 450 reading for the prebleed of each animal from the O.D. 450 for each animal post-immunization.

### Balb/C Mouse Efficacy Model

[0713] In a typical experiment, about 5-6 week old female BALB/c mice (10-20 per group) were obtained and allowed to acclimate for one week. Fusion proteins formulated in PBS or other suitable formulation were administered by s.c. injection. Mice were immunized on days 0 and 14. On day 21, sera was harvested by retro-orbital puncture and evaluated for M2e specific IgG by ELISA. Mice were challenged by intranasal administration of 1×LD90 of the well characterized mouse adapted Influenza A strain, A/Puerto Rico/8/34 (H1N1). Mice were monitored daily for 14 days for survival and weight loss. Mice that lost about 30% of their initial body weight were humanely sacrificed, and the day of sacrifice recorded as the day of death. Efficacy data were reported as survival times.

### Results

### In Vitro Bioactivity

[0714] These assays were based on cell lines expressing the relevant TLR and screened for the ability to produce either IL8 or TNF-α in response to TLR triggering. In FIG. 52, the ability of STF2.4×M2e (▪) or STF2.OVA(◯) to stimulate TLR5 dependent IL8 production was evaluated following the stimulation of TLR5 positive, HEK293 cells. The results indicate that both fusion proteins stimulated IL8 production in a dose dependent manner and that the activity of the PAMP was retained in the context of the fusion.

[0715] TLR2 activity was similarly evaluated for Pam3Cys.M2e following stimulation of TLR2 positive RAW264.7□cells. In FIG. 51, the experimental groups are: the known endotoxin, LPS, as a positive control (♦), LPS plus the inhibitor of endotoxin polymixin B (PMB) as a negative control (◯), free Pam3Cys as a positive control for TLR2 signalling (▪), free Pam3Cys plus PMB (□), Pam3Cys.M2e (♦) and Pam3Cys.M2e plus PMB (⋄). The results showed similar activity profiles for Pam3Cys.M2e and the free TLR2 ligand Pam3Cys. The addition of polymyxin B (PMB) did not reduce its activity, indicating that there is no or low endotoxin contamination.

### Physical Linkage of PAMP and Antigen Enhances Immunogenicity

[0716] Using mouse models of immunogenicity, chemical coupling of Pam3Cys to M2e enhances the immunogenicity of the M2e antigen as compared to either the M2e peptide delivered alone or the M2e peptide co-delivered with free Pam3Cys. In the experiment shown in FIG. 52, groups of mice were immunized on days 0 and 21 with PBS as a negative control (□*), the free TLR2 ligand, Pam3CSK-4 ( ), M2e peptide alone (∘), free Pam3CSK-4 mixed with M2e peptide (□), or the fusion of Pam3Cys and M2e referred to as Pam3.M2e (♦). The relevant the molar ratio of M2e peptide delivered was held constant. On day 28, sera were harvested and analyzed for M2e-specific antibody titers by ELISA. The results show that chemical coupling of Pam3Cys to the M2e (Pam3Cys.M2e) generates a detectable serum antibody response to the M2e antigen.

[0717] Physical linkage between the TLR5 ligand STF2 and antigen was demonstrated using the model antigen ovalbumin (OVA). Mice received a single s.c. immunization with STF2, OVA, STF2.OVA fusion protein, STF2+OVA mixture or PBS alone. Dosages were calculated to deliver 12 μg equivalents of STF2 and OVA per group. Seven days later, sera were harvested and OVA-specific antibodies were examined by ELISA. Data shown in FIG. 53 depict IgG1 titers at a 1:100 dilution of the sera. These results demonstrate that physical linkage of the TLR5 ligand and antigen results in optimal immunogenicity in vivo.

PAMP Linked Antigens are More Immunogenic than Conventional Adjuvant

[0718] Groups of 5 BALB/c mice were immunized on day 0 and 14 with 30 μg of Pam3Cys.M2e (♦), 22.5 μg of M2e which is the molar equivalent of M2e in 30 μg of Pam3Cys.M2e (⋄), 22.5 mg of M2e adsorbed to the conventional adjuvant Alum (□), or 25 mg of the recombinant protein STF2.4×M2e (▪). A group receiving PBS was included as a negative control (∘). Sera were harvested 7 days post the second dose and M2e specific IgG were evaluated by ELISA. The results shown in FIG. 54 indicate that M2e alone is poorly immunogenic in that it failed to elicit antibody titers above background. The conventional adjuvant Alum provided a modest enhancement in the immune response to M2e. The PAMP linked M2e constructs; however, provided the greatest enhancement in immunogenicity. These results indicate direct linkage of PAMPs with portions of an integral membrane protein of an influenza viral protein can elicit immune responses that are more potent than those elicited by the conventional adjuvant Alum.

### Dose and Immunogenicity

[0719] Dose ranging studies were carried out to further assess the potency of Pam3Cys.M2e and STF2.4×M2e. For STF2.4×M2e, BALB/c mice were immunized on day 0 and 14 with dilutions of STF2.4×M2e that ranged from 0.25 to 25 μg of STF2.4×M2e per immunization. The prefix D002 refers to the specific batch of STF2.4×M2e used in this experiment, while R-028 refers to a historical reference batch of STF2.4×M2e used in this experiment. Seven days following the last immunization (Day 21) mice were bled and M2e-specific IgG responses were evaluated by ELISA. The results shown in FIG. 55 demonstrate that immunization with doses as low as 0.25 μg per immunization of STF2.4×M2e induced detectable levels of M2e-specific IgG, with the optimal dose in mice falling in the range of about 2.5 to about 25 μg.

[0720] For Pam3Cys.M2e, BALB/c mice were immunized on day 0 and 14 with 0.05 to 30 μg of Pam3Cys.M2e per immunization. Seven days following the last immunization (Day 21) mice were bled and M2e-specific IgG responses were evaluated by ELISA. The results shown in FIG. 56 demonstrate that immunization with concentrations as low as 0.05 μg of Pam3Cys.M2e induced detectable levels of M2e-specific IgG, with the optimal dose for mice in this study of about 30 μg.

### Immunogenicity in Multiple Mouse Strains

[0721] The immunogenicity of Pam3Cys.M2e was evaluated in multiple mouse strains including BALB/c (), C57BL/6 (▪), CB6/F1 (♦), DBA/2 (▴), Cr:NIH (Swiss) (X) and C3H/HeN (*). Groups of five for each strain were immunized on day 0 and 14 with 30 μg of Pam3Cys.M2e per immunization. Sera were harvested on day 21 and levels of M2e-specific IgG evaluated by ELISA. All strains exhibited significant levels of M2e-specific IgG indicating that the immunogenicity of Pam3Cys.M2e is not dependent on a particular MHC (FIG. 57).

### Immunogenicity in Rabbits

[0722] Studies aimed at evaluating the immunogenicity of Pam3Cys.M2e and STF2.4×M2e in a second species, rabbit, were carried out. In the first study, rabbits (3 females and 3 males/group) were immunized with 500, 150, 50, 15 or 5 μg (i.m.) of Pam3Cys.M2e on day 0, 21 and 42. As a control, an additional group received the formulation buffer F111 (10 mM Tris, 10 mM histidine, 75 mM NaCl, 5% sucrose, 0.02% Polysorbate-80, 0.1 mM EDTA, 0.5% ethanol, 20 mg/mL hydroxypropyl-beta-cyclodextrin, pH 7.2). On day 7 post-boost 2, peripheral blood was obtained and the anti-M2e antibody titers were evaluated by ELISA. The results shown in FIG. 58 depict the individual rabbit antibody titers at a 1:125 dilution of the sera. The data suggest a dose-response relationship between the amount of Pam3Cys.M2e used for prime/boost vaccinations and the level of the antibody titer achieved.

[0723] In the second study, rabbits (3 females and 3 males/group) were immunized with 500, 150, 50, 15 or 5 μg (i.m.) of STF2.4×M2e. As a control, an additional group received saline alone. On day 14 post-immunization, peripheral blood was obtained and the anti-M2e antibody titers were evaluated by ELISA. Notably, significant M2e-specific IgG responses were detectable by day 14 post-prime in all animals immunized (FIG. 59). The results indicate that STF2.4×M2e elicits a rapid and consistent immune response in rabbits.

### Efficacy in the Mouse Challenge Model

[0724] The efficacy of the Pam3Cys.M2e and STF2.4×M2e was evaluated in BALB/c mice using the well characterized mouse adapted strain, Influenza A/Puerto Rico/8/34 (PR/8) as the challenge virus. Groups of ten mice were immunized s.c. on day 0 and 14 with 30 μg of Pam3Cys.M2e in the formulation buffer F111 (▪), 30 μg of Pam3Cys.M2e in the proprietary buffer F120 (10 mM Tris, 10 mM histidine, 10% sucrose, 0.02% Polysorbate-80, 0.1 mM EDTA, 0.5% ethanol, 0.075% docusate sodium, pH 7.2) (▴), 30 μg of Pam3Cys.M2e in the buffer F119 (10 mM Tris, 10 mM histidine, 75 mM NaCl, 5% sucrose, 0.02% Polysorbate-80, 0.1 mM EDTA, 0.5% ethanol, 0.1% docusate sodium, pH 7.2), 30 μg of STF2.4×M2e in the buffer F105 (10 mM Tris, 10 mM histidine, 75 mM NaCl, 5% sucrose, 0.02% Polysorbate-80, 0.1 mM EDTA, 0.5% ethanol, pH 7.2), 3 μg of STF2.4×M2e in buffer F105 (10 mM Tris, 10 mM histidine, 75 mM NaCl, 5% sucrose, 0.02% Polysorbate-80, 0.1 mM EDTA, 0.5% ethanol, pH 7.2) () or 0.3 μg of STF2.4×M2e in buffer F105 (□). A group receiving PBS alone was included as a negative control (∘), and a convalescent group with immunity to PR/8 following a sublethal challenge with the virus was included as a positive control (⋄). On day 28, animals were challenge with an LD90 of the PR/8 challenge stock. Weight loss and survival was followed for 14 days post challenge (FIG. 60).

[0725] Animals in the convalescent group which had successfully cleared an earlier non-lethal infection with PR/8 demonstrated 100% protection to a subsequent viral challenge. Animals receiving the PBS buffer alone exhibited morbidity beginning on days 7 and 8, with 80% lethality occurring by day 10, while animals immunized with 30 μg of Pam3Cys.M2e in F111 demonstrated enhanced survival, with 50% of mice surviving the challenge. Animals receiving Pam3Cys.M2e in F119 exhibited morbidity beginning on days 8 and 9 with 80% of the mice surviving. Animals receiving Pam3Cys.M2e in buffer F120 (10 mM Tris, 10 mM histidine, 10% sucrose, 0.02% Polysorbate-80, 0.1 mM EDTA, 0.5% ethanol, 0.075% docusate sodium, pH 7.2) or the STF2.4×M2e protein exhibited the mildest disease course with 90 to 100% of the mice in these groups surviving the lethal challenge. These results demonstrate that both Pam3Cys.M2e and STF2.4×M2e can confer protective immunity to a challenge with influenza A in vivo.

### Discussion

[0726] Salmonella typhimurium flagellin (fljB) is a ligand for TLR5. A recombinant protein consisting of full-length flijB (STF2) fused to four tandem repeats of M2e was expressed in E. coli and purified to >95% purity with low endotoxin levels. In reporter cell lines, this protein (STF2.4×M2e) triggered IL8 production in a TLR5-dependent fashion. Mice immunized with dilutions of STF2.4×M2e that ranged from 0.25 μg to 25 μg, formulated in the buffer F105 which is without a conventional adjuvant or carrier, mounted a vigorous antibody response. The potency of the recombinant protein was further demonstrated in rabbit immunogenicity studies where animals receiving as little as 5 μg of protein seroconverted after a single dose. The efficacy of the PAMP fusion protein was demonstrated in the mouse challenge model using Influenza A/Puerto Rico/8/34 as the challenge virus. Mice immunized with as little as about 0.3 μg of the protein per dose exhibited mild morbidity with 100% of the mice surviving the challenge.

[0727] Synthetic tripalmitoylated peptides mimic the acylated amino terminus of lipidated bacterial proteins and are potent activators of TLR2. In these studies, a tripalmitoylated peptide consisting of three fatty acid chains linked to a cysteine residue and the amino terminus of the Influenza A M2 ectodomain (M2e) was synthesized using standard solid-phase peptide chemistries. This peptide (Pam3Cys.M2e) triggered TNFα production in a TLR2-dependent fashion in reporter cell lines. When used to immunize mice without adjuvant, Pam3Cys.M2e generated an antibody response that was more potent than M2e when mixed with free Pam3CSK-4. Pam3Cys.M2e was also found to be immunogenic in rabbits where a dose response relationship was observed between the amount of Pam3Cys.M2e used for immunization and the antibody titer achieved. The efficacy of the Pam3Cys.M2e peptide in a number of different formulations was evaluated in the mouse challenge model using Influenza A/Puerto Rico/8/34 as the challenge virus. Pam3Cys.M2e formulated in F119 and F120 exhibited the mildest morbidity with about 80 to about 100% of the mice surviving the challenge.

### Example 20

### Materials and Methods

[0728] PCR Amplification and DNA primers

[0729] All PCR amplifications were performed using Pfu Ultra Hotstart PCR Master Mix (Catalog number 600630) from Stratagene (La Jolla, Calif.) according to the manufacturer's recommendations. DNA primers were purchased from Sigma Genosys and are described below.

STF28BGF-1:
(SEQ ID NO: 642)
CTCGGGAGATCTGCACAAGTAATCAACACTAACAGTCT
STF28MCR-1:
(SEQ ID NO: 643)
CCATGGGCTAGCAGGATCCACCGGCGCTCCCTGCACGTTCA
STF28MCF-2:
(SEQ ID NO: 644)
GGAGCGCCGGTGGATCCTGCTAGCCCATGGACCGAAAACCCG
STF28ECR-2:
(SEQ ID NO: 645)
TCTGCAGAATTCACGTAACAGAGACAGCACGTTCTGCGGGACGTCCCGC
AGAACGTGCTGTCTCTGTTACGTGAATTCTGCAGA
pET24AR:5
(SEQ ID NO: 646)
TCCGGCGTAGAGGATCGAGA
STF2-E3R3:
(SEQ ID NO: 647)
CAATTGACCTTCAAGCTTCGAATTGCCCTTACGTAACAGAGACAGCACG
TTCTG
AX-E3F3:
(SEQ ID NO: 648)
AAGCTTGAAGGTCAATTGGAATTCCCTAGGACTAGTATGGAAAAATTG
CAGTTGAAG
pET24AF:
(SEQ ID NO: 649)
GCTTAATGCGCCGCTACAGG
5′WNE28:
(SEQ ID NO: 650)
GCGGCCGCTCATGGAAAAATTGCAGTTGAAGGGAACAACC
3′WNE28:
(SEQ ID NO: 651)
CCGCGGTTTGCCAATGCTGCTTCCAGACTTGT
NdeI-STF2:
(SEQ ID NO: 652)
CCGGCATGCCATATGGCACAAGTAATCAACACTAACAGTCTGTCGCTGC
BlpI-EdIII:
(SEQ ID NO: 654)
GCATGCTCAGCTTATTAAGGGTTTGCCAATGCTGCTTCCCAGACTTGTG
JE EIII primer:
(SEQ ID NO: 53)
TACGTGAATTCAGCAGATATCCAGCAC

Cloning of pET/STF2Δ.EIII

[0730] Full length flagellin of Salmonella typhimurium fljb (flagellin phase 2) (also referred to herein as “STF2”) is encoded by a 1.5 kb gene. A truncated version of the STF2 (STF2Δ, SEQ ID NO: 604, encoded by SEQ ID NO: 605) was generated by deleting the hyper-variable region that spans amino acids 170 to 415 of SEQ ID NO: 312. The deleted region was replaced with a short flexible linker (GAPVDPASPW, SEQ ID NO: 657) designed to facilitate interactions of the NH2 and COOH termini sequences necessary for TLR5 signaling. To generate this construct, a two-step PCR was used. In the first reaction, STF2.OVA (SEQ ID NO: 753 encoding amino acid sequence SEQ ID NO: 754) served as the DNA template and STF28BGF-1 and STF28MCR-1 were used as primer pairs. In a separate reaction, the same DNA template was combined with primers STF28MCF-2 and STF28ECR-2.

[0731] The PCR amplification reactions generated about 500 bp and about 270 bp fragments, respectively. These PCR products were combined in a final PCR reaction using STF28BGF-1 and STF28ECR-2 as primers. The amplified DNA product from this reaction (about 0.77 kb) was digested with BglII and EcoRI restriction enzymes and ligated into pMTBiP/V5-His B (Invitrogen, Carlsbad, Calif.) that had previously been digested with BglII and EcoRI and treated with alkaline phosphatase. An aliquot of the ligation mix was used to transform TOP10 cells (InVitrogen, Carlsbad, Calif.). PCR screening was performed using vector specific primers, pMTFOR (methionine promoter) (CATCTCAGTGCAACTAAA, SEQ ID NO: 757) and BGHREV (bovine growth hormone poly A) (TAGAAGGCACAGTCGAGG, SEQ ID NO: 758), to identify several positive clones. All positive clones were further analyzed by restriction mapping analysis and confirmed by DNA sequencing. The resultant construct pMT/STF2Δ was used to generate pMT/STF2Δ.EIII+.

[0732] The domain III of the West Nile virus envelope protein of pET/STF2Δ.EIII+ (SEQ ID NOS: 672, 673) was derived from the Drosophila expression plasmid pMT/STF2.E. This plasmid contains full-length STF2 (amino acids 1-506, SEQ ID NO: 312) fused to the West Nile Virus envelope protein (amino acids 1-406, SEQ ID NO: 640). The pMT/STF2.E (SEQ ID NO: 759) clone AX-1 was used as a DNA template and 5′WNE28 (SEQ ID NO: 650) and 3′WNE28 (SEQ ID NO: 651) served as primers for PCR amplification. In order to facilitate restriction analysis and subsequent cloning steps, the 5′ primer encoded a novel NotI site (New England Biolabels, Beverly, Mass.) and the 3′ primer contained a unique SacII site. The amplified EIII+ DNA fragment (345 bp; SEQ ID NO: 779 that encodes amino acids 292-406 of SEQ ID NO: 640) was subcloned into pCR-Blunt II-TOPO cloning vector (InVitrogen, Carlsbad, Calif.) to generate plasmid TOPOEIII. A stop codon was subsequently introduced downstream of the EIII+ sequence by blunting the SacII and SpeI restriction sites using T4 DNA polymerase.

[0733] To generate pMT/STF2Δ.EIII+ (SEQ ID NOS: 671, 672), the EIII+ fragment was isolated from TOPOEIII+ using NotI and BamHI restriction sites and ligated into the NotI and SacII restriction sites in pMT/STF2Δ. The BamHI site of the EIII+ DNA fragment and the SacII site of pMTSTF2Δ were blunted with T4 DNA polymerase prior to ligation. The STF2Δ.EIII+ sequence (SEQ ID NOS: 671, 672) from pMT/STF2Δ.EIII+ was isolated by PCR amplification using the primers NdeI-STF2 and BlpI-EdIII. To generate pET/STF2Δ.EIII+ (SEQ ID NO: 672), the PCR product was digested with NdeI and BlpI and ligated into pET24a plasmid that had been predigested with NdeI and BlpI. The ligation mix was transformed into Mach-1 cells (InVitrogen, Carlsbad, Calif.) and the cells were grown on LB supplemented with 50 μg/ml kanamycin. Several colonies were screened by restriction mapping and were verified by DNA sequencing.

Cloning of pET/STF2.EIII+

[0734] The West Nile virus EIII+ sequence of pET/STF2.EIII+ (SEQ ID NOS: 655, 656) was derived from pETSTF2.E (SEQ ID NOS: 759, 760). This E. coli expression plasmid contains full-length STF2 (amino acids 1-506) fused to the West Nile Virus envelope protein (amino acids 292-406 of SEQ ID NO: 640, which is SEQ ID NO: 608). In two independent PCR reactions, pET/STF2.E was used as the DNA template. One reaction used the primers pET24AR:5 (SEQ ID NO: 646) and STF2-E3R3: (SEQ ID NO: 647) and the other used AX-E3F3 (SEQ ID NO: 648) and pET24AF (SEQ ID NO: 649). These PCR reactions generated a 1.5 kb fragment that consisted of full-length STF2 and a 340 bp fragment that comprised the EIII domain plus additional amino acids that extended into domain I of the envelope protein. Aliquots of these PCR amplification reactions were combined, and the two products served as templates for a PCR reaction with the external primers pET24AR (SEQ ID NO: 646) and pET24AF (SEQ ID NO: 649). This resulted in the generation of about a 1.8 kb DNA fragment that fused EIII+ sequence (SEQ ID NO: 779, a nucleic acid sequence encoding amino acids 292-406 of SEQ ID NO: 640, which is SEQ ID NO: 608) to STF2. The PCR product was digested with NdeI and BlpI and gel purified and ligated by compatible ends to a pET24a vector that had previously been digested with compatible enzymes and de-phosphorylated. The ligation mix was transformed into Mach-1 cells (InVitrogen, Carlsbad, Calif.) as described for pET/STF2Δ.EIII+. Several colonies were screened by restriction mapping and two clones were verified by DNA sequencing.

Cloning of pET/STF2Δ.JEIII+

[0735] A portion of the envelope protein of a Japanese encephalitis virus (JEV) (strain SA-14-14-2 (Jai, L., et al., Chin Med J (Eng) 116:941-943 (2003)); currently employed in a JEV vaccine encoded by domain III was custom synthesized by DNA 2. Inc (Menlo Park, Calif.). The portion of domain III was excised from the pJ2:G01510 using NotI and Blp I site that flank the insert. The DNA insert was gel isolated and cloned by compatible ends to pET24A/STF2Δ.EIII+ (SEQ ID NOS: 671, 672) that had previously been digested with the appropriate enzymes to release the West Nile virus EIII+ insert. The deleted vector was then gel purified and ligated to an aliquot of JE EIII+. The ligation mix was used to transform TOP-10 cells (InVitrogen, Carlsbad, Calif.) and the cells were grown on LB supplemented with 50 μg/ml kanamycin. Several colonies were screened by restriction mapping and were verified by DNA sequencing.

[0736] The resulting construct, pET24A/STF2Δ.JEIII (SEQ ID NOS: 606, 607) was BLR (DE3) strain (Novagen) and expression was monitored in several clones using Commassie Blue staining which was confirmed by Western blot using anti-flagellin antibodies. Using, pET24A/STF2Δ.JEIII+ as the DNA template and the JE EIII+ oligonucleotide as primer (SEQ ID NO: 654) the cysteine residue in the linker region between STF2Δ and JEIII+ was changed to a serine residue using QuikChange Site Directed Mutagenesis Kit (Stratagene, LaJolla, Calif.) according to the manaufacturer's instructions. The clone was verified by sequencing and assayed for expression as described for pET24A/STF2Δ.JEIII+ above.

[0737] When a cysteine residue in a linker in change to a serine residue the fusion protein in also referred to herein by includsion of an “s” in the designation of the fusion protein. For example, “STF2Δ.EIII+” includes a cysteine residue in the linker (SEQ ID NO: 672), whereas “STF2Δ.EIIIs+” include a serine residue substituted for the cysteine residue in the linker (SEQ ID NO:).

### Cloning the EIII Domain of Each Dengue Virus Fused to the C-Terminal End of Flagellin (STF2Δ)

[0738] Initially, obtaining biologically active material from the fusion of the entire envelope protein of West Nile virus was difficult, perhaps due to the presence of multiple cysteines residues (12 cysteines) in the envelope protein (see SEQ ID NO: 640). However, when the region encoding domain III (EIII) of the protein was sub-cloned, the fusion protein was abundantly expressed in E. coli and was highly efficacious in mice. Although there is an overall sequence dissimilarity among the 4 distinct DEN viruses (Den1, Den2, Den3, Den4, SEQ ID NOS: 761, 768, the three-dimensional structures within domain III of the envelope protein are similar among the flaviviruses. This domain in DEN and other flaviviruses encodes the majority of the type-specific contiguous critical/dominant neutralizing epitopes. Domain III of the dengue viruses (Den1, Den2, Den3 and Den4) has been expressed in bacteria and shown to be immunogenic, capable of inducing neutralizing antibodies in experimental animals (Simmons, M., et al., Am. J. Trop. Med. Hyg 65:159 (2001)). Domain III corresponding to residues about 295 to about 399 (exact numbering depends on the particular DEN virus, for example, of SEQ ID NOS: 761, 763, 765, 767) of the four different DEN viruses have been codon-optimized for expression in E. coli. The synthetic gene was amplified by using PCR and sub-cloned into the NotI site of the vector pET/STF2Δ generating pET/STF2Δ.DEN1EIII, pET/STF2Δ.DEN2EIII, pET/STF2Δ.DEN3EIII and pET/STF2Δ.DEN4EIII (SEQ ID NOS: 681, 683, 685 and 687).

E. coli Production of STF2.EIII+, STF2Δ.EIII+, STF2Δ.EIIIs+ and STF2Δ.JEIII+

[0739] Cell cultures (6 L) of BLR(DE3) pLysS that harbor pETSTF2.EIII+ (SEQ ID NOS: 655, 656), pETSTF2Δ.EIII+ (SEQ ID NOS: 671, 672), pETSTF2Δ.EIIIs+ (SEQ ID NOS: 673, 674) or pETSTF2Δ.JEIII+ SEQ ID NOS: 606, 607) were grown in LB medium containing 15 μg/ml kanamycin, 12.5 μg/ml tetracycline and 24 μg/ml chloramphenicol. At an OD₆₀₀ of about 0.6 protein expression was induced with 1 mM IPTG for about 3 h at about 37° C. Following induction, cells were harvested by centrifugation (7000 rpm×7 minutes in a Sorvall RC5C centrifuge) and resuspended in 2×PBS, 1% glycerol, DNAse, 1 mM PMSF, protease inhibitor cocktail and 1 mg/ml lysozyme. The suspension was passed through a microfluidizer to lyse the cells and the lysate was centrifuged (45,000 g for one hour in a Beckman Optima L ultracentrifuge) to separate the soluble fraction from inclusion bodies. Under these growth and induction conditions, STF2.EIII+ was expressed as a soluble protein and STF2Δ.EIII+ (SEQ ID NOS: 671, 672), STF2Δ.EIIIs+ (SEQ ID NOS: 673, 674) and STF2Δ.JEIII+ (SEQ ID NOS: 606, 607) formed inclusion bodies.

### Purification of STF2.EIII+

[0740] Cell lysate containing soluble STF2.EIII+ (SEQ ID NOS: 655, 656) was applied to Sepharose Q resin (Amersham Biosciences, Piscataway, N.J.) in the presence of 0.5 M NaCl to reduce DNA, endotoxin, and other contaminants. The flow-through fraction was collected and the conductivity adjusted by a 10-fold dilution with buffer A (Buffer A: 100 mM Tris-C1, pH 8.0). The diluted material was re-loaded onto Q Sepharose and bound protein was eluted with a linear gradient from 20% to 60% Buffer B (Buffer B: 100 mM Tris-C1, 1 M NaCl, pH 8.0). Fractions containing STF2.EIII+ were pooled and further processed by Superdex-200 gel (SD200) filtration chromatography in the presence of Na-deoxycholate to remove residual endotoxin (running buffer: 1% Na-deoxycholate, 100 mM NaCl, 100 mM Tris-HCl, 1% glycerol, pH 8.0). Following SD200 chromatography, the eluted protein was loaded directly onto Q Sepharose and washed extensively with buffer A to remove detergent. Bound protein was again eluted with a linear gradient from 20% to 60% Buffer B. In one preparation (Batch 057), this step was substituted with a detergent removal procedure using Extract-D detergent removal gel (Pierce Biotechnology, Rockford, Ill.). The purified protein was dialyzed against buffer containing 50 mM Tris, 100 mM NaCl and 1% glycerol and stored at −80° C.

### Purification of STF2Δ.EIII+

[0741] STF2Δ.EIII+ inclusion bodies were collected by low-speed centrifugation (7000 rpm×7 minutes in a Sorvall RC5C centrifuge) and solubilized with buffer containing 8 M urea, 100 mM Tris-HCl, 5 mM EDTA, pH 8.0. The urea concentration of the solubilized protein was adjusted to 1 M and the sample was loaded onto Q Sepharose. The bound protein was eluted using a linear gradient from 0% to 100% Buffer B. (Buffer A: 100 mM Tris-HCl, 5 mM EDTA, 1 M urea, pH 8.0. Buffer B: 100 mM Tris-C1, 5 mM EDTA, 1 M NaCl, 1 M urea, pH 8.0). Due to the formation of protein aggregates following elution, the urea concentration of the Q Sepharose material was adjusted to 8 M. The protein was further purified by gel filtration chromatography using SD200. The column was pre-equilibrated with 100 mM Tris-HCl, pH 8.0, 100 mM NaCl, 1% glycerol, 8 M urea plus 1% Na-deoxycholate. The eluted protein was subjected to a second IEX chromatography step using Source Q to remove 1% Na-deoxycholate. Bound protein was eluted with a linear gradient from 20% to 60% Buffer B. (Buffer A: 100 mM Tris-C1, pH 8.0, 8 M urea, 5 mM EDTA. Buffer B: 100 mM Tris-HCl, pH 8.0, 5 mM EDTA, 8 M urea, 1 M NaCl). Final polishing of the protein was completed by gel filtration chromatography using SD200 (Running Buffer: 100 mM Tris-HCl, pH 8.0, 8 M urea, 100 mM NaCl and 1% glycerol). Reducing agent was added to the SD200 fraction (2.5 mM DTT) and the protein was refolded by step-wise dialysis against decreasing concentrations of urea. The urea concentration was reduced sequentially against buffers that contained 100 mM Tris-HCl, pH 8.0, 100 mM NaCl, 1% glycerol and 6 M, 4 M, 2 M or no urea.

### Refolding and Purification of STF2Δ.EIII+ Trimer

[0742] STF2Δ.EIII+ (SEQ ID NOS: 671, 672) from urea-solubilized inclusion bodies was efficiently refolded to form trimer product by simple dialysis as described above the trimer (3 of these STFΔ.EIII fusion proteins) was deduced based on molecular weight in SDS-PAGE. Following dialysis, endotoxin was removed by multiple extractions with Triton X-114. The trimer was purified and separated from monomer and aggregates by 5200 size exclusion chromatography. The final product migrated as a single band with an apparent molecular weight of about 130 kDa on SDS-PAGE.

### Refolding and Purification of STF2Δ.EIII+ Monomer

[0743] The monomeric form of STF2Δ.EIII+ (SEQ ID NOS: 671, 672) was produced consistently and efficiently by refolding using rapid dilution, which prevented individual STF2Δ.EIII+ fusion proteins from interacting with one another to form meutimers, such as trimers (supra). STF2Δ.EIII+ solubilized from inclusion bodies in 4M urea was raised to 8M urea without reductant. The protein was then rapidly diluted in Tris/NaCl/glycerol buffer, pH 8.0, to about 0.1 mg/ml and a final urea concentration of 0.1M at room temperature. The monomer was further purified and separated from aggregates by 5200 size exclusion chromatography. The final product migrated as a single band with an apparent molecular weight of about 43 kDa on SDS-PAGE.

### Purification of STF2Δ.EIIIs+ (Serine Substitution of the Linker Between STF2Δ and EIII+, SEQ ID NO: 673)

[0744] STF2Δ.EIIIs+ (SEQ ID NOS: 673, 674) from solubilized inclusion bodies was refolded using a rapid dilution method similar to that used to refold the STF2Δ.EIII+ monomer. The refolded protein was captured on a butyl sepharose column and eluted while removing most of the endotoxin contamination. Eluate from the butyl sepharose purification was concentrated and put through 4 cycles of Triton X-114 extractions to reduce endotoxin levels down to about <0.1 EU/μg before a final purification step over SD200 gel filtration. The final pooled product migrated as a single band with an apparent molecular weight of about 43 kDa on SDS-PAGE and contained a trace amount of Triton X-114 (about 0.000015%).

### Purification of STF2Δ.JEIII+ (SEQ ID NOS: 606, 607)

[0745] Protein was isolated from inclusion bodies under denaturing conditions. Inclusion bodies were washed with detergent (0.5% Triton X 100) and solubilized in 8 M urea, resulting in partial purification of the target protein. For endotoxin removal, protein was applied on a Source S cation exchange column at low pH (about 3.5) and eluted with a salt gradient (0 to about 1M NaCl). The protein was refolded using rapid dilution as described for STF2Δ.EIII+ monomer. The protein was then concentrated and further purified using SD200 to separate the monomeric form of the protein from aggregates. The purified material migrated with an apparent molecular weight of about 43 kDa on SDS PAGE and contained acceptable levels of endotoxin (about 0.03 EU/ug).

### Fed Batch Production of Fusion Proteins

[0746] STF2Δ.EIIIs+ was produced in an aerobic bioreactor using a fed batch process. Three control loops were placed to control pH by acid (2 N HCl) or base (3 N NH₄OH) addition, temperature by heating (heating blanket) or cooling (time cycled cooling loop), and dissolved oxygen by compressed air flow (manually controlled), agitation (mixing speed) and O₂ flow (timed cycled) in cascade. Cells [BLR(DE3) pLysS that harbor the STF2Δ.EIIIs+ were adapted to and banked in MRSF media (see infra), and frozen in 25% glycerol. Cells were scaled up for the bioreactor by adding 1 mL of banked cells to 1 L of MRSF media and agitating at about 37° C. for about 15.5 to about 16.5 hours. Cells from the scale up process were added in a about 1:10 ratio to MRSF or MRBR synthetic media at about 37° C. and about 0.5 vvm air flow.

[0747] The process was run in batch mode at about 37° C. until the cells oxygen consumption was such that the compressed air flow is about 1.5 vvm and the agitation is at the maximum, about 6 hours, when the temperature is dropped to between about 25° C. and about 33° C. The feed can be started before the culture is induced, or up to about 1 and about ½ hours after. The feed rate can be kept constant, or adjusted based on process variables (dissolved oxygen, glucose concentration). The culture was induced with IPTG upon batch glucose exhaustion. The culture was maintained for a minimum of about 2 hours and a maximum of about 20 hours.

| | |
|---|---|
| | Trace |
| MRBR Media | Metal Solution 1000x |

| Composition | g/L | Component | g/L |
|---|---|---|---|
| Glucose | 20 | EDTA, disodium | 5 |
| KH₂PO₄ | 2.2 | FeSO₄(7H₂O) | 10 |
| (NH₄)₂SO₄ | 4.5 | ZnSO₄(7H₂O) | 2 |
| Citric Acid | 1.0 | MnSO₄(H₂O) | 2 |
| MgSO₄(7H₂0) | 1.0 | CoC1₂(6H₂O) | 0.2 |
| CaCl₂ | 0.04 | CuSO₄(5H₂O) | 0.1 |
| Trace Metals | 1 ml | Na₂MoO₄(2H₂O) | 0.2 |
| Thiamine HCl | 0.01 | H₃BO₃ | 0.1 |
| Antifoam | 0.05 | | |

| MRSF Media | | | Feed Media | |
|---|---|---|---|---|
| Composition | g/L | | Composition | g/L |
| Glucose | 10 | (20 in bioreactor) | NaC1 | 0.5 |

| | | | |
|---|---|---|---|
| KH₂PO₄ | 7.8 | FeSO₄(7H₂O) | 2 |
| (NH₄)₂SO4 | 2.33 | CaC1₂ | 3.5 |
| Citric Acid | 1.0 | MgSO₄(7H₂O) | 12 |
| MgSO₄(7H₂0) | 1.0 | Thiamine HC1 | 1 |
| CaCl₂ | 0.04 | Trace Metals | 1 ml |
| Trace Metals | 1 ml | Glucose | 100 |
| Thiamine HCl | 0.01 | | |

| | | |
|---|---|---|
| Kanamycin | 0.0075 | (shake flask only) |

[0748] STF2Δ.EIIIs+ was produced as inclusion bodies. Upon harvest, the cells were separated from the conditioned media by centrifugation (Beckman Avanti J-20 XP, JLA 8.1000 rotor, 10 k×g for about 20 minutes at about 4° C.) and resuspended in equal volume of 50 mM Tris, 100 mM NaCl, 1 mM EDTA, pH 8.0. The centrifugation was repeated under the same conditions, with the cells resuspended in a minimum volume of the same buffer. The suspension was passed through a homogenizer (APV-1000) at >10,000 psi for at least two passes.

[0749] The solids can be separated and the STF2Δ.EIIIs solubilized by one of three methods; centrifugation, filtration, or fluidized bed chromatography.

### Method 1

[0750] Solids are separated by centrifugation (Beckman Avanti J-20 XP, JA 20 rotor, 20 k×g for 20 minutes at 4° C.) and resuspended in 50 mM tris, 1 m NaCl, 1 mM EDTA, 1% glycerol, 0.5% Triton X-100, pH 8.0. This process was repeated up to 6 times (total) at increasing speeds and times (to a maximum of about 40 k×g for about 20 minutes). After the final pellet recovery, the pellet was resuspended in 50 mM Tris, 0.1M NaCl, 1 mM EDTA, pH 8.0 and clarified by centrifugation (Beckman Avanti J-20 XP, JA 20 rotor, 40 k×g for about 20 minutes at about 4° C.) The pellet was resuspended and dissolved in 50 mM Tris, 0.1M NaCl, 1 mM EDTA, 4 M urea, pH 8.0. Insolubles were removed by centrifugation (Beckman Avanti J-20 XP, JA 20 rotor, 40 k×g for about 50 minutes at about 4° C.), the supernatant retained for further processing.

[0751] After the multiple washes described above, STF2Δ.EIIIs can also be dissolved in 50 mM acetate, 10 mM NaCl, 8M urea, pH about 4.1 to about 5.3 and clarified by centrifugation (Beckman Avanti J-20 XP, JA 20 rotor, 20 k×g for about 20 minutes).

### Method 2

[0752] After homogenization, the lysate was captured in body feed and STF2Δ.EIIIs+ extracted with urea containing buffer. Body feed is a filter aid designed to trap particles in a cake above a depth filter. The body feed (Advanced Minerals Corporation CelPure 65) is a diatomite (silica powder) with a high surface area and low permeability, retaining <0.2 μm particles. The filter aid was pre-mixed with the lysate and pumped over a depth filter (Ertel 703), building up a cake containing both body feed and lysate particles. The suspension creates a depth filter as the particles settle on the filter pad. A 50 mM Tris, 100 mM NaCl pH 8.0 wash was performed to remove soluble proteins and nucleic acids. A subsequent wash with 50 mM Tris, 100 mM NaCl, 4 M urea, pH 8 solubilizes and removes the STF2Δ.EIIIs from the body feed for further processing.

### Method 3

[0753] After the cells were initially resuspended in buffer, they were resuspended in sodium chloride and urea containing buffer at pH about 6 to about 8 and homogenized. The lysate was applied on a Streamline CST fluidized bed column (GE Healthcare) where the STF2Δ.EIIIs+ binds to the resin and the particulates flow through. STF2Δ.EIIIs+ may be eluted in low salt conditions at a pH greater than the load pH, in the presence or absence of detergents such as Triton X-100 or polysorbate 80.

### SDS-PAGE

[0754] Proteins (typically about 5 μg) were diluted in SDS-PAGE sample buffer with and without β-mercaptoethanol. The samples were boiled for 5 minutes and loaded onto a 4-20% SDS polyacrylamide gel. Following electrophoresis, gels were stained with coomassie blue to visualize protein bands.

### Endotoxin Assay

[0755] Endotoxin levels were measured using the QCL-1000 Quantitative Chromogenic LAL test kit (BioWhittaker #50-648 U, Walkersville, Md.), following the manufacturer's instructions for the microplate method.

### Protein Assay

[0756] Protein concentrations were determined by the MicroBCA Protein Assay Reagent Kit in a 96-well format using BSA as a standard (Pierce Biotechnology, Rockford, Ill.).

### TLR5 Bioactivity Assay

[0757] HEK293 cells (ATCC, Catalog No. CRL-1573 Manassas, Va.) constitutively express TLR5, and secrete several soluble factors, including IL-8, in response to TLR5 signaling. Cells were seeded in 96-well microplates (about 50,000 cells/well), fusion proteins added and incubated overnight. The next day, the conditioned medium was harvested, transferred to a clean 96-well microplate, and frozen at −20° C. After thawing, the conditioned medium was assayed for the presence of IL-8 in a sandwich ELISA using an anti-human IL-8 matched antibody pair (Pierce, #M801E and #M802B, Rockford, Ill.) following the manufacturer's instructions. Optical density was measured using a microplate spectrophotometer (FARCyte, Amersham Biosciences, Piscataway, N.J.).

### Plaque Reduction Neturalization Test (PRNT)

[0758] PRNT was performed according to Wang, et al., J. Immunol. 167:5273-5277 (2001). Briefly, serum samples were heat inactivated by incubation in a 56° C. water bath for about 30 min and were serially diluted in PBS with 5% gelatin from 1/10 to 1/2560. West Nile virus was diluted in PBS with 5% gelatin so that the final concentration was about 100 PFU/well. Virus was mixed with about 75 μl serum in a 96-well plate at about 37° C. for about 1 h. Aliquots of serum-virus mixture were inoculated onto confluent monolayers of Vero cells in a six-well tissue culture plate. The cells were incubated at about 37° C. for 1 h, and the plates were shaken every 15 min. The agarose overlay was then added. The overlay was prepared by mixing equal volumes of a solution consisting of 100 ml 2×MEM (Life Technologies) with sterile 2% agarose. Both solutions were placed in a 40° C. water bath for 1 h before adding the overlay. The cells were incubated for 4 days at 37° C. in a humidified 5% CO₂-air mixture. A second overlay with an additional 4% neutral red was added on day 5. Virus plaques were counted about 12 h later.

### Antigenicity of STF2Δ-Fusion Proteins

[0759] ELISA plates (96-well) were coated overnight at 4° C. with serial dilutions (100 μl/well) of purified STF2Δ-fusion proteins (SEQ ID NOS: 759, 760, 655, 656, 671, 672) in PBS (about 2 μg/ml). Plates were blocked with 200 μl/well of Assay Diluent Buffer (ADB; BD Pharmingen) for one hour at room temperature. The plates were washed 3× in PBS-Tween, and then incubated with antibodies reactive with flagellin or the E domain of the construct. The expression of flagellin was detected using the mAb 6H11 (Intotek), while the antigenicity of WNV-E was monitored using a panel of mAb (5C5, 7H2, 5H10, 3A3, and 3D9) (Beasley, D. W., et al., J. Virol. 76:13097-13100 (2002)) were purchased from Bioreliance (Road Rockville, Md.). Antibodies diluted in ADB (about 100 μl/well) were incubated overnight at 4° C. The plates were washed 3× with PBS-T. HRP-labeled goat anti-mouse IgG antibodies (Jackson Immunochemical, West Grove, Pa.) diluted in ADB were added (100 μl/well) and the plates were incubated at room temperature for 1 hour. The plates were washed 3× with PBS-T. After adding TMB (3,3′,5,5′-tetramentylbenzidine) Ultra substrate (Pierce Biotechnology, Rockford, Ill.) and monitoring color development, A₄₅₀ was measured on a Tecan Farcyte microspectrophotometer.

### Immunization of Mice

[0760] C3H/HeN mice (10 per group) were immunized intraperitoneally or subcutaneously with the indicated concentrations of fusion proteins or synthetic peptides on days 0, 14 and 28. On days 21 and 35, immunized animals were bled by retro-orbital puncture. Sera were harvested by clotting and centrifugation of the heparin-free blood samples. On day 35, mice were challenged with a lethal dose of WNV strain 2741 (Wang, T., et al., J. Immunol. 167:5273-5277 (2001)). Survival was monitored for 21 days post-challenge.

### Serum Antibody Determination

[0761] West Nile envelope protein specific IgG levels were determined by ELISA. ELISA plates (96-wells) were coated overnight at about 4° C. with 100 μl/well of West Nile E protein mAb 5C5, 7H2, 5H10, 3A3, and 3D9 (Beasley, D. W., et al., J. Viro. 76:13097-13100 (2002)) (Bioreliance, Road Rockville, Md.) in PBS at a concentration of 2 μg/ml. Plates were blocked with 200 μl/well of Assay Diluent Buffer (ADB; BD Pharmingen, San Diego Calif.) for one hour at room temperature. The plates were washed 3× in PBS-T. Dilutions of the sera in ADB were added (100 μl/well) and the plates were incubated overnight at 4° C. The plates were washed 3× with PBS-T. HRP-labeled goat anti-mouse IgG antibodies (Jackson Immunochemical, West Grove, Pa.) diluted in ADB were added (100 μl/well) and the plates were incubated at room temperature for 1 hour. The plates were washed 3× with PBS-T. After adding TMB (3,3′,5,5′-tetramentylbenzidine) Ultra substrate (Pierce Biotechnology, Rockford, Ill.) and monitoring color development, A₄₅₀ was measured on a Tecan Farcyte microspectrophotometer.

### Production of Pam3Cys.WNV001 Peptide Synthesis

[0762] Pam3Cys.WNV001 was synthesized by Bachem Bioscience, Inc. (King of Prussia, Pa.). WNV001 is a 20 amino acid peptide (SEQ ID NO: 769) of the West Nile virus envelope protein chemically coupled to a tri-palmitoylcysteine (Pam3Cys) moiety through the amino terminal serine residue of the peptide. The chemical name for Pam3Cys.WNV001 is [Palmitoyl-Cys((RS)-2,3-di(palmitoyloxy)-propyl)-LTSGHLKCRVKMEKLQLKGT (SEQ ID NO: 769) acetate salt]. The molecular mass of Pam3Cys.WNV001 is 3163.3 daltons. The peptide was synthesized by Bachem using solid phase synthesis methodologies and FMOC chemistry. The amino acid sequence of Pam3Cys.WNV001 was assembled on an H-Pro-2-chlorotrityl chloride resin by solid phase peptide synthesis. The peptide chain was elongated by successive coupling of the amino acid derivatives. Each coupling step was preceded by an Fmoc-deprotection step and were accompanied by repeated washing of the resin. After coupling of the last amino acid derivative, the final Fmoc-deprotection step was performed. Finally, the peptide resin was washed and dried under reduced pressure. During solid phase peptide synthesis color indicator tests were performed for each step to monitor the completion of the Fmoc-cleavage and the subsequent coupling of the amino acid derivatives. To couple Pam3Cys-OH to the elongated peptide, the lipid moiety was pre-activated with N,N′-dicyclohexyl-carbodiimide (DCCI) in the presence of 1-hydroxybenzotriazole (HOBt). The resulting solution was filtered and added to the peptide resin. At the end of the reaction time the peptide resin was washed and dried under reduced pressure. Color indicator tests were performed to control the coupling of Pam3Cys-OH. The completed peptide was cleaved from the resin by incubating with trifluoroacetic acid (TFA). The liberated product (crude peptide material) was precipitated from the reaction mixture and lyophilized. The crude product was used for initial immunogenicity studies.

### Synthesis of WNV-E Peptide Arrays

[0763] Peptide arrays (SEQ ID NOS: 701-752) were synthesized by Sigma Genosys (Woodlands, Tex.).

### Results

### West Nile Fusion Protein

[0764] West Nile virus (WNV) has emerged in recent years in temperate regions of Europe and North America, presenting a threat to public and animal health. The most serious manifestation of WNV infection is fatal encephalitis (inflammation of the brain) in humans and horses, as well as mortality in certain domestic and wild birds. WNV has also been a significant cause of human illness in the United States. The envelope glycoprotein of West Nile (WNV-E) and other flaviviruses may generate neutralizing and protective antibodies. By linking this antigen to a Toll-like Receptor ligand, the compositions, fusion proteins and polypeptides described herein may target appropriate antigen presenting cells without the need for adjuvant or other immune modulator formulations.

[0765] As described herein, several strategies have been implemented to facilitate production of West Nile virus envelope (WNV-E) fusion proteins in E. coli. One approach is to engineer a smaller WNV-E antigen by fusing domain III (EIII) and, optionally, with amino acids of domain II of the WNV-E protein to full-length STF2 (e.g., STF2.E, STF2.EIII+). Domain III is responsible for virus-host interactions and retains many West Nile virus neutralizing antibody epitopes. It also contains only 2 of the 12 cysteine residues present within the full length envelope protein, making expression in E. coli more feasible. A second approach has been to delete the hyper-variable hinge region of flagellin (e.g., STF2Δ) thereby creating a smaller fusion protein (STF2Δ.EIII+) The hyper-variable region of flagellin is not required for TLR5 signaling and its removal may also reduce the immunogenic potential of flagellin. Both STF2.EIII+ and STF2Δ.EIII+ have been expressed in E. coli and purified. The purified proteins have been characterized for TLR5 signaling activity in bioassays and for E epitope display in ELISA assays using a panel of WNV-E polyclonal and neutralizing monoclonal antibodies. Results from these studies indicate that STF2Δ.EIII+ has higher PAMP activity and more conformation-sensitive neutralizing WNV-E epitopes than STF2.EIII+.

### Purity of STF2.EIII+ and STF2Δ.EIII+

[0766] Several lots of STF2.EIII+ and STF2Δ.EIII+ have been produced in E. coli and purified (Table 12). STF2.EIII+ was expressed as a soluble protein and purified under non-denaturing conditions using a 4-step process, as described above, that included anion exchange chromatography and gel filtration. Final yields from 6 L cultures ranged from about 0.9 mg to about 3.8 mg and all preparations contained low levels of endotoxin as measured by standard LAL procedures (about <0.1 EU/μg protein, see supra). In contrast, STF2Δ.EIII+ formed inclusion bodies in E. coli, and was purified under denaturing conditions. All chromatography steps used to purify STF2Δ.EIII+ required the use of 8M urea. Following purification, the denatured protein was refolded by step-wise dialysis to allow for gradual urea removal. Refolding was typically carried out at protein concentrations of about 0.3 mg/ml without any loss due to protein precipitation. Two preparations of STF2Δ.EIII+ from a single 6 L culture yielded about 1.2 and about 6.7 mg of protein, both of which had acceptable endotoxin levels. As expected, purified STF2.EIII+ and STF2Δ.EIII+ migrated on SDS PAGE under reducing conditions as about 65 kDa and about 43 kDa proteins, respectively. Notably, STF2Δ.EIII+ migrated slightly faster under non-reducing conditions. This altered migration may be due to disulfide bond formation involving the two cysteines residues in domain III of the envelope protein. As well, a larger species of STF2Δ.EIII+ was detected by Western blot analysis whose molecular weight is consistent with a trimer form of the protein (“(STF2Δ.EIII+)×3 or 3 units of STF2Δ.EIII+”).

TABLE 11
Endotoxin levels and TLR-5 activity for STF2.EIII+
(SEQ ID NO: 656) and STF2Δ.EIII+
(SEQ ID NO: 672) fusion proteins.

| | | Yield | Endotoxin | | |
|---|---|---|---|---|---|
| Batch Number | Protein | (mg) | Levels (EU/μg) | TLR-5 EC₅₀ | |
| 052 | STF2.EIII+ | 3.8 | 0.03 | >5000.00 | ng/ml |
| 054 | STF2.EIII+ | 0.9 | 0.02 | 1195.00 | ng/ml |
| 057 | STF2.EIII+ | 1.6 | 0.07 | 197.92 | ng/ml |
| 044 | STF2Δ.EIII+ | 1.2 | 0.07 | 1.13 | ng/ml |
| 045 | STF2Δ.EIII+ | 6.7 | 0.07 | 4.34 | ng/ml |

### TLR5 Activity in the HEK293 IL-8 Assay

[0767] To compare the PAMP activity of both fusion proteins, a TLR5 bioassay was performed. HEK293 IL-8 cells were treated with serial dilutions of two independent protein batches (FIGS. 62A and 62B). Cultures were incubated for a 24 hour period and conditioned media were harvested and assayed for IL-8 production by ELISA. As shown in FIG. 62A, STF2Δ.EIII+ showed potent TLR-5 activity. Regression analysis of the titration curve determined the EC₅₀ of batches 2004-044 and 2004-045 to be 1.13 ng/ml and 4.34 ng/ml, respectively (Table 11, supra). In both cases, the TLR5 specific-activity was at least about 10-fold higher than the control protein STF2.OVA. In contrast, 2 preparations of STF2.EIII+ showed significantly weaker TLR5 activity than STF2.OVA. The EC₅₀ of STF2.EIII+ batches 054 and 057 were about 1195.00 ng/ml and about 197.92 ng/ml.

### Antigenicity of STF2.EIII+ and STF2Δ.EIII+

[0768] The antigenicity of STF2.EIII+ and STF2Δ.EIII+ was examined by direct ELISA using a flagellin monoclonal antibody specific for the N-terminal region of STF2 (6H11, Inotek Pharmaceuticals, Beverly, Mass.) and a panel of WNV-E-specific antibodies (5C5, 5H10, 3A3, 7H2 and 3D9, Bioreliance, Road Rockville, Md.) previously shown to neutralize West Nile virus in vitro. As shown in FIG. 63, a comparison of the reactivity of full length West Nile virus envelope protein with STF2Δ.EIII+ revealed that West Nile virus monoclonal antibodies 5C5, 5H10, 3A3 and 7H2, but not 3D9 recognize the fusion protein. This pattern of reactivity is consistent with the proposed location of 5C5, 5H10, 3A3 and 7H2 epitopes within EIII. The epitope for 3D9 lies outside of domain III of the West Nile virus envelope protein. As expected, all West Nile virus monoclonal antibodies reacted with full length West Nile virus envelope protein and the flagellin monoclonal only reacted with STF2Δ.EIII+. Both proteins reacted with a polyclonal West Nile virus envelope antiserum, but STF2Δ.EIII+ reactivity was somewhat reduced, perhaps due to the reduced number of potential epitopes present in the smaller domain.

[0769] Using 5C5 and 7H10 WNV monoclonal antibodies, a direct antigenic comparison was made between STF2.EIII+ and STF2Δ.EIII+ (FIGS. 64A, 64B, 64C and 64D). In these studies, plates were coated with the indicated proteins and then detected with polyclonal rabbit anti-E, or mouse monoclonal antibodies as described. As shown in FIGS. 64A, 64B, 64C and 64D, both STF2.EIII+ and STF2Δ.EIII+ were readily detected with the flagellin monoclonal antibody with no significant differences in reactivity. However, distinct reactivity with the anti-envelope monoclonal antibodies was observed. The reactivity of STF2Δ.EIII+ with either 5C5 or 7H2 was significantly greater than that observed with STF2.EIII+. Collectively, these results indicate that the flagellin 6H11 epitope of STF2Δ.EIII+ is uncompromised and is comparable to the flagellin sequence of STF2.EIII+. They also highlight distinct differences in the antigenicity of the EIII domains of these proteins and indicate that STF2Δ.EIII+ contains more of the critical conformation dependent neutralizing epitopes than STF2.EIII+.

### Efficacy and Immunogenicity

[0770] Several efficacy studies designed to examine the protective efficacy our candidates in C3H/HeN mice following challenge with West Nile virus have been completed. Studies typically consisted of 5 groups of mice (10 mice per group) immunized intraperitoneally (i.p.) or subcutaneously (s.c.) on days 0, 14 and 28. On days 21 and 35, sera were harvested and tested for West Nile virus envelope protein—IgG antibody (ELISA) and the ability to neutralize West Nile virus in vitro (PRNT assay). On day 35, mice were challenged with a lethal dose of West Nile virus strain 2741. Survival was monitored for 21 days post-challenge.

[0771] Mice were immunized with PBS, Drosophila conditioned medium containing STF2.E (CM, positive control), 25 μg of STF2Δ.EIII+ i.p., 25 μg STF2Δ.EIII+ s.c., 25 μg STF2.EIII+ i.p. and 25 μg STF2.EIII+ s.c. The West Nile virus envelope protein antibody responses and survival data are shown FIGS. 65 and 66. By day 35 all groups that received STF2Δ.EIII+ had significant levels of West Nile virus envelope protein IgG. In contrast, mice that received STF2.EIII+ had no measurable West Nile virus envelope protein antibody response. Administration of STF2Δ.EIII+ i.p. or s.c led to 100% survival following West Nile virus challenge. Consistent with the poor immunogenicity of STF2.EIII+, little to no protection was provided by this candidate when compared to the PBS control. The poor immunogenicity and efficacy of STF2.EIII+ in this study are attributed to the reduced TLR5 activity and/or the weak EIII epitope reactivity of this protein.

### Plaque Reduction Neutralization Titers

[0772] To further evaluate the West Nile virus envelope protein antibody response elicited by STF2Δ.EIII+ and potentially correlate protective efficacy with neutralizing antibody titers, the plaque reduction neutralization test (PRNT) was performed. Day 35 serum samples from efficacy studies described above were tested for their ability to block West Nile virus infection in cultured Vero cells. Briefly, pooled mouse serum samples were heat-inactivated and serially diluted two-fold in PBS with 0.5% gelatin. Dilutions starting with 1:10 were incubated with about 100 pfu of the West Nile virus strain 2741. The virus/serum mixture was incubated at about 37° C. for 1 h and then inoculated onto confluent monolayers of Vero cells (ATCC, Catalog Number CCL-81, Manassas, Va.) in duplicate wells of 6-well tissue culture plates. The virus was allowed to adsorb to the cell monolayer prior to adding a 1% agarose overlay. Infected cell cultures were incubated for 4 days at 37° C. followed by a second agarose overlay containing 4% neutral red. Virus plaques were counted 12 h later. Serum titers that led to 80% reduction in viral plaque numbers (PRNT₈₀) were recorded.

[0773] A summary of the PRNT₈₀ data from efficacy studies concerning STF2.EIII+ and STF2Δ.EIII+ is presented in Table 12 below. In two independent studies involving STF2.EIII+ where survival of about 50% or less was reported, pooled sera failed to inhibit plaque formation. This finding is not surprising given the weak antibody response elicited by this construct. In three efficacy studies involving STF2Δ.EIII+ where survival was about 70% or greater, pooled sera had neutralization titers of 1:40 or better. Neutralization titers of 1:40 or greater typically correlate with protection in vivo.

TABLE 12
Survivial and PRNT₈₀ Results for STF2.EIII+ (SEQ ID NO: 656),
STF2Δ.EIII+ (SEQ ID NO: 672) and STF2.E (SEQ ID NO: 760)
CM (Control Media) Fusion Proteins

| Batch | Candidate | Route | Study # | Survival (%) | PRNT₈₀ (dilution) |
|---|---|---|---|---|---|
| 054 | STF2.EIII+ | i.p. | 3 | 50 | Negative |
| 057 | STF2.EIII+ | i.p. | 4 | 11 | Negative |
| 057 | STF2.EIII+ | s.c. | 4 | 20 | negative |
| 044 | STF2Δ.EIII+ | i.p. | 2 | 70 | 1:40 |
| 045 | STF2Δ.EIII+ | i.p. | 3 | 90 | 1:40 |
| 045 | STF2Δ.EIII+ | s.c. | 3 | 100 | 1:160 |
| 045 | STF2Δ.EIII+ | i.p. | 4 | 100 | 1:80 |
| 045 | STF2Δ.EIII+ | s.c. | 4 | 100 | 1:40 |
| — | STF2.E CM | i.p. | 3 | 90 | 1:640 |
| — | STF2.E CM | i.p. | 4 | — | 1:1280 |

### STF2Δ.EIIIs+ a Modified Version of STF2Δ.EIII+

[0774] Protein preparations of STF2Δ.EIII+ tested in the mouse efficacy studies described above were purified by anion-exchange and size-exclusion chromatography steps carried out under denaturing conditions followed by refolding using step-wise dialysis. With this process, two predominant species that correspond to the monomeric and trimeric forms of STF2Δ.EIII+ were generated and present as a mixture in the final product. To minimize the heterogeneity of the final product, new refolding and purification methods have been developed that favor the production of either monomer or trimer. Because it is unclear which form of STF2Δ.EIII+ is the active component or if both are equally potent, both species have been produced in milligram quantities and tested for efficacy in mice.

[0775] It was initially unclear as to why STF2Δ.EIII+ refolding resulted in the formation of a trimeric species. However, when the sequence of the STF2Δ.EIII+ expression construct was re-examined, we identified a cysteine residue within the linker sequence that separates STF2Δ from EIII+. The presence of this cysteine would likely interfere with the formation of the appropriate disulfide bond during refolding and might account for the trimeric form of STF2Δ.EIII+. This unnecessary cysteine was changed to a serine using site-directed mutagenesis and the modified protein (STF2Δ.EIIIs+) was produced and purified. It should be noted that refolding the serine-substituted construct yielded only monomeric protein.

[0776] Protective efficacy of STF2Δ.EIII+ (monomer) and STF2Δ.EIIIs+ (trimer) were evaluated in C3H/HeN mice following challenge with West Nile virus. Five groups of mice (10 per group) were immunized with about 25 ug of protein s.c. on days 0, 14 and 28. On days 21 and 35, sera were harvested and tested for WNV-E IgG antibody (ELISA). On day 38, mice were challenged with a lethal dose of WNV strain 2741 and survival was monitored for 21 days. ELISA results from boost 2 (day 35, FIG. 67) and survival data (FIG. 68) indicate that all constructs elicited significant levels of WNV-E reactive IgG prior to viral challenge and provided about 90% to about 100% protection against the lethal infection. These findings indicate that monomeric or multimeric (e.g., trimers) forms of STFΔ.EIII+ are efficacious and removal of the additional cysteine from the construct does not appreciably impact potency. Removal of the cysteine within the linker sequence may simplify purification of the protein by reducing heterogeneity following protein refolding.

### CONCLUSION

[0777] Two recombinant fusion proteins containing the Salmonella typhimurium flagellin (STF2) fused to EIII+ domain of West Nile virus envelope protein have been generated. One includes the full length STF2 sequence (STF2.EIII+) and the other a modified version of STF2 that lacks the internal hypervariable region of STF2 (STF2Δ.EIII+). Both proteins have been expressed in E. coli and purified by conventional means using anion exchange chromatography and gel filtration. STF2.EIII+ was produced as a soluble protein and was purified under non-denaturing conditions. In contrast, STF2Δ.EIII+ was expressed as an insoluble protein and was purified under denaturing conditions and refolded by step-wise dialysis to remove urea. In HEK293 IL8 assays, preparations of STF2Δ.EIII+ showed greater TLR-5 activity than STF2.EIII+.

[0778] In envelope protein epitope display analysis using ELISA assays and West Nile virus envelope protein antibodies, STF2Δ.EIII+ displayed more of the critical conformation dependent neutralizing epitopes. Consistent with the potent TLR-5 activity and envelope protein epitope antigenicity observed with STF2Δ.EIII+, STF2Δ.EIII+ was highly immunogenic and efficacious in mice challenged with a lethal dose of West Nile virus. Because monomeric and trimeric species of STF2Δ.EIII+ were generated during the purification process of this protein, a cysteine within the linker sequence of the expression construct was changed to a serine. Removal of this cysteine eliminated the production of trimeric forms of the protein during refolding and resulted in the generation of monomeric product that displayed potent efficacy in vivo.

Japanese encephalitis Fusion Protein

[0779] JE virus is localized in Asia and northern Australia (about 50,000 cases with about 10,000 deaths annually). An approved inactivated virus vaccine was recently associated with a case of acute disseminated encephalomyelitis, prompting the Japanese Ministry of Health, Labor and Welfare to recommend the nationwide suspension of the vaccine. Given the complexities of producing inactivated viruses in infected mouse brains or even in cell culture, and the potential for adverse events associated with inactivated viruses, the opportunity for recombinant-based JE vaccine is appealing.

[0780] A STF2Δ.JEIII+ fusion construct was constructed. The JE EIII+ DNA fragment was generated synthetically and codon optimized for expression in E. coli. The sequence was ligated into pET24STF2Δ to generate pETSTF2Δ.JEIII+. Expression constructs have been screened by restriction analysis and for expression in E. coli BLR(DE3) by IPTG induction. The DNA sequence of each construct has been confirmed, and production of the protein has been scaled up. A batch of material has been generated. A total of about 24 mg of material was purified. This material has potent TLR5 activity, acceptable levels of endotoxin (about 0.03 EU/μg) and a A280/A260 ratio of about 1.3.

### Flavivirus Peptides

### Identification of WNV-E Specific Antibody Epitopes

[0781] To identify linear epitopes within the West Nile virus envelope protein that are recognized by antisera from STFΔ.EIIIs+ immunized mice, several synthetic peptide arrays were generated. One array consisted of overlapping peptides of 20 amino acids in length that spanned the entire West Nile virus domain III and parts of domain II (SEQ ID NOS: 726-752). ELISA results with this array identified a highly reactive 20 amino acid sequence that mapped to the N-terminal region of domain III and included part of the domain I domain CRVKMEKLQLKGTTYGVCSK (SEQ ID NO: 726). To fine map this epitope, additional arrays were generated that focused on the domain I and II junctions (SEQ ID NOS: 701-752). These arrays included an alanine substitution scan to identify amino acids critical for antibody binding (SEQ ID NOS: 726-752). As shown in FIGS. 69 and 70, antisera from STF2Δ.EIII (monomer and trimer) and STF2Δ.EIIIs+ immunized mice reacted with peptides that spanned the EI/EIII junction (peptides E-30 to E-42) and included the E2-21 peptide CRVKMEKLQLKGTTYGVCSK (SEQ ID NO: 726). This reactivity was severely reduced when specific amino acids (E6, K7, L10 and K11) were changed to alanines (FIG. 71). Although it is not known if the antibodies that recognize this epitope are neutralizing, efforts are underway to design and test a peptide vaccine based on this region of WNV-E.

### Immunogenicity of Pam3Cys.WNV001 Peptide Vaccine

[0782] A lipidated West Nile virus envelope protein fused to Pam3Cys on the N-terminal end was synthesized using the 20 amino acid sequence LTSGHLKCRVKMEKLQLKGT (SEQ ID NO: 770) (Putnak, R., et al, Vaccine 23:4442-4452 (2005)). The immunogenicity of this peptide was tested in C3H/HeN mice and compared to peptide without Pam3Cys (FIG. 72). The reactivity of antisera from immunized animals was tested by direct ELISA as described in the legend and the results indicate that the Pam3Cys.WNV001 peptide is significantly more immunogenic than the peptide without the TLR2 modification. The antisera from these studies will be tested in virus neutralization assays (PRNT) to determine if the antibodies elicited will neutralize West Nile virus in vitro. The lipidated peptide will also be tested in the West Nile virus challenge model to assess protective efficacy against a lethal virus challenge.

### Assay Development

### Competition ELISA Assay Development

[0783] To assess the neutralizing potential of antisera derived from immunized mice, a competition ELISA assay was developed using well-characterized monoclonal antibody (7H2) that neutralizes West Nile virus in culture and reacts with a conformation-sensitive epitope within the EIII domain of the West Nile virus envelope protein antigen. The assay was designed as a capture ELISA that measures the ability of sera from immunized animals to prevent 7H2 from binding West Nile virus envelope protein. Serial dilutions ranging from 1:10 to 1:5000 of day 35 mouse antisera from efficacy study 4 (FIGS. 65 and 66, Table 13) were incubated with biotinylated West Nile virus envelope protein and then added to ELISA plates pre-coated with 7H2 monoclonal antibody (Bioreliance, Road Rockville, Md.). Following several washes to remove unbound material, bound West Nile virus envelope protein was detected using avidin-HRP. Results from a representative experiment are shown in FIG. 69. At dilutions of 1:25, a measurable loss of West Nile virus envelope protein binding to 7H2-coated plates was observed when antisera derived from animals immunized with STF2Δ.EIIIs where tested. No competition was detected with antisera derived from mock immunized animals that received PBS in place of antigen. These initial results demonstrate that antibodies elicited by STF2Δ.EIII+ compete with 7H2 for binding Wests Nile virus envelope protein. These findings are consistent with the protection from WNV infection observed in animals immunized with STF2Δ.EIII+ and help establish a correlation between antibody epitope reactivity in vitro and efficacy in vivo.

[0784] While this invention has been particularly shown and described with references to example embodiments thereof, it will be understood by those skilled in the art that various changes in form and details may be made therein without departing from the scope of the invention encompassed by the appended claims.

The application's sequence listing, which the Patent Office published only in electronic form, follows.

SEQUENCE LISTING (839 sequences)

SEQ ID NO: 1 - protein, 565 aa, Influenza A/Puerto Rico/8/34 HA
MKANLLVLLSALAAADADTICIGYHANNSTDTVDTVLEKNVTVTHSVNLLEDSHNGKLCRLKGIAPLQLGKCNIAGWLLGNPECDPLLPVRSWSYIVETPNSENGICYPGDFIDYEELREQLSSVSSFERFEIFPKESSWPNHNTNGVTAACSHEGKSSFYRNLLWLTEKEGSYPKLKNSYVNKKGKEVLVLWGIHHPPNSKEQQNLYQNENAYVSVVTSNYNRRFTPEIAERPKVRDQAGRMNYYWTLLKPGDTIIFEANGNLIAPMYAFALSRGFGSGIITSNASMHECNTKCQTPLGAINSSLPYQNIHPVTIGECPKYVRSAKLRMVTGLRNIPSIQSRGLFGAIAGFIEGGWTGMIDGWYGYHHQNEQGSGYAADQKSTQNAINGITNKVNTVIEKMNIQFTAVGKEFNKLEKRMENLNKKVDDGFLDIWTYNAELLVLLENERTLDFHDSNVKNLYEKVKSQLKNNAKEIGNGCFEFYHKCDNECMESVRNGTYDYPKYSEESKLNREKVDGVKLESMGIYQILAIYSTVASSLVLLVSLGAISFWMCSNGSLQCRICI

SEQ ID NO: 2 - protein, 564 aa, Influenza A/Vietnam/1203/2004 HA
MEKIVLLFAIVSLVKSDQICIGYHANNSTEQVDTIMEKNVTVTHAQDILEKKHNGKLCDLDGVKPLILRDCSVAGWLLGNPMCDEFINVPEWSYIVEKANPVNDLCYPGDFNDYEELKHLLSRINHFEKIQIIPKSSWSSHEASLGVSSACPYQGKSSFFRNVVWLIKKNSTYPTIKRSYNNTNQEDLLVLWGIHHPNDAAEQTKLYQNPTTYISVGTSTLNQRLVPRIATRSKVNGQSGRMEFFWTILKPNDAINFESNGNFIAPEYAYKIVKKGDSTIMKSELEYGNCNTKCQTPMGAINSSMPFHNIHPLTIGECPKYVKSNRLVLATGLRNSPQRERRRKKRGLFGAIAGFIEGGWQGMVDGWYGYHHSNEQGSGYAADKESTQKAIDGVTNKVNSIIDKMNTQFEAVGREFNNLERRIENLNKKMEDGFLDVWTYNAELLVLMENERTLDFHDSNVKNLYDKVRLQLRDNAKELGNGCFEFYHKCDNECMESVRNGTDYPQYSEEARLKREEISGVKLESIGIYQILSIYSTVASSLALAIMVAGLSLWMCSNGSLQCR

SEQ ID NO: 3 - protein, 568 aa, Influenza A/Indonesia/5/2005 HA
MEKIVLLLAIVSLVKSDQICIGYHANNSTEQVDTIMEKNVTVTHAQDILEKTHNGKLCDLDGVKPLILRDCSVAGWLLGNPMCDEFINVPEWSYIVEKANPTNDLCYPGSFNDYEELKHLLSRINHFEKIQIIPKSSWSDHEASSGVSSACPYLGSPSFFRNVVWLIKKNSTYPTIKKSYNNTNQEDLLVLWGIHHPNDAAEQTRLYQNPTTYISIGTSTLNQRLVPKIATRSKVNGQSGRMEFFWTILKPNDAINFESNGNFIAPEYAYKIVKKGDSAIMKSELEYGNCNTKCQTPMGAINSSMPFHNIHPLTIGECPKYVKSNRLVLATGLRNSPQRESRRKKRGLFGAIAGFIEGGWQGMVDGWYGYHHSNEQGSGYAADKESTQKAIDGVTNKVNSIIDKMNTQFEAVGREFNNLERRIENLNKKMEDGFLDVWTYNAELLVLMENERTLDFHDSNVKNLYDKVRLQLRDNAKELGNGCFEFYHKCDNECMESIRNGTYNYPQYSEEARLKREEISGVKLESIGTYQILSIYSTVASSLALAIMMAGLSLWMCSNGSLQCRICI

SEQ ID NO: 4 - protein, 565 aa, Influenza A/NewCaledonia/20/1999
MKAKLLVLLCTFTATYADTICIGYHANNSTDTVDTVLEKNVTVTHSVNLLEDSHNGKLCLLKGIAPLQLGNCSVAGWILGNPECELLISKESWSYIVETPNPENGTCYPGYFADYEELREQLSSVSSFERFEIFPKESSWPNHTVTGVSASCSHNGKSSFYRNLLWLTGKNGLYPNLSKSYVNNKEKEVLVLWGVHHPPNIGNQRALYHTENAYVSVVSSHYSRRFTPEIAKRPKVRDQEGRINYYWTLLEPGDTIIFEANGNLIAPWYAFALSRGFGSGIITSNAPMDECDAKCQTPQGAINSSLPFQNVHPVTIGECPKYVRSAKLRMVTGLRNIPSIQSRGLFGAIAGFIEGGWTGMVDGWYGYHHQNEQGSGYAADQKSTQNAINGITNKVNSVIEKMNTQFTAVGKEFNKLERRMENLNKKVDDGFLDIWTYNAELLVLLENERTLDFHDSNVKNLYEKVKSQLKNNAKEIGNGCFEFYHKCNNECMESVKNGTYDYPKYSEESKLNREKIDGVKLESMGVYQILAIYSTVASSLVLLVSLGAISFWMCSNGSLQCRICI

SEQ ID NO: 5 - protein, 566 aa, Influenza A/South Carolina/1/18HA
MEARLLVLLCAFAATNADTICIGYHANNSTDTVDTVLEKNVTVTHSVNLLEDSHNGKLCKLKGIAPLQLGKCNIAGWLLGNPECDLLLTASSWSYIVETSNSENGTCYPGDFIDYEELREQLSSVSSFEKFEIFPKTSSWPNHETTKGVTAACSYAGASSFYRNLLWLTKKGSSYPKLSKSYVNNKGKEVLVLWGVHHPPTGTDQQSLYQNADAYVSVGSSKYNRRFTPEIAARPKVRDQAGRMNYYWTLLEPGDTITFEATGNLIAPWYAFALNRGSGSGIITSDAPVHDCNTKCQTPHGAINSSLPFQNIHPVTIGECPKYVRSTKLRMATGLRNIPSIQSRGLFGAIAGFIEGGWTGMIDGWYGYHHQNEQGSGYAADQKSTQNAIDGITNKVNSVIEKMNTQFTAVGKEFNNLERRIENLNKKVDDGFLDIWTYNAELLVLLENERTLDFHDSNVRNLYEKVKSQLKNNAKEIGNGCFEFYHKCDDACMESVRNGTYDYPKYSEESKLNREEIDGVKLESMGVYQILAIYSTVASSLVLLVSLGAISFWMCSNGSLQCRICI

SEQ ID NO: 6 - protein, 329 aa, Influenza A/Wisconsin/67/2005 HA
QKLPGNDNSTATLCLGHHAVPNGTIVKTITNDQIEVTNATELVQSSSTGGICDSPHQILDGENCTLIDALLGDPQCDGFQNKKWDLFVERSKAYSNCYPYDVPDYASLRSLVASSGTLEFNDESFNWTGVTQNGTSSACKRRSNNSFFSRLNWLTHLKFKYPALNVTMPNNEKFDKLYIWGVHHPGTDNDQIFLHAQASGRITVSTKRSQQTVIPNIGSRPRIRNIPSRISIYWTIVKPGDILLINSTGNLIAPRGYFKIRSGKSSIMRSDAPIGKCNSECITPNGSIPNDKPFQNVNRITYGACPRYVKQNTLKLATGMRNVPEKQTR

SEQ ID NO: 7 - protein, 328 aa, Influenza A/X31 subtype H3N2 HA
QDLPGNDNSTATLCLGHHAVPNGTLVKTITDDQIEVTNATELVQSSSTGKICNNPHRILDGIDCTLIDALLGDPHCDVFQNETWDLFVERSKAFSNCYPYDVPDYASLRSLVASSGTLEFITEGFTWTGVIQNGGSNACKRGPGSGFFSRLNWLTKSGSTYPVLNVTMPNNDNFDKLYIWGIHHPSTNQEQTSLYVQASGRVTVSTRRSQQTIIPNIGSRPWVRGLSSRISIYWTIVKPGDVLVINSNGNLIAPRGYFKMRTGKSSIMRSDAPIDTCISECITPNGSIPNDKPFQNVNKITYGACPKYVKQNTLKLATGMRNVPEKQT

SEQ ID NO: 8 - protein, 272 aa, Artificial Sequence
  PR/8 HA1-1
SHNGKLCRLKGIAPLQLGKCNIAGWLLGNPECDPLLPVRSWSYIVETPNSENGICYPGDFIDYEELREQLSSVSSFERFEIFPKESSWPNHNTNGVTAACSHEGKSSFYRNLLWLTEKEGSYPKLKNSYVNKKGKEVLVLWGIHHPPNSKEQQNLYQNENAYVSVVTSNYNRRFTPEIAERPKVRDQAGRMNYYWTLLKPGDTIIFEANGNLIAPMYAFALSRGFGSGIITSNASMHECNTKCQTPLGAINSSLPYQNIHPVTIGECPKYVR

SEQ ID NO: 9 - protein, 223 aa, Artificial Sequence
  PR/8 HA1-2
KGIAPLQLGKCNIAGWLLGNPECDPLLPVRSWSYIVETPNSENGICYPGDFIDYEELREQLSSVSSFERFEIFPKESSWPNHNTNGVTAACSHEGKSSFYRNLLWLTEKEGSYPKLKNSYVNKKGKEVLVLWGIHHPPNSKEQQNLYQNENAYVSVVTSNYNRRFTPEIAERPKVRDQAGRMNYYWTLLKPGDTIIFEANGNLIAPMYAFALSRGFGSGIITS

SEQ ID NO: 10 - protein, 176 aa, Artificial Sequence
  PR/8 HA1-3
NSENGICYPGDFIDYEELREQLSSVSSFERFEIFPKESSWPNHNTNGVTAACSHEGKSSFYRNLLWLTEKEGSYPKLKNSYVNKKGKEVLVLWGIHHPPNSKEQQNLYQNENAYVSVVTSNYNRRFTPEIAERPKVRDQAGRMNYYWTLLKPGDTIIFEANGNLIAPMYAFALSRG

SEQ ID NO: 11 - protein, 274 aa, Artificial Sequence
  VN HA1-1
EKKHNGKLCDLDGVKPLILRDCSVAGWLLGNPMCDEFINVPEWSYIVEKANPVNDLCYPGDFNDYEELKHLLSRINHFEKIQIIPKSSWSSHEASLGVSSACPYQGKSSFFRNVVWLIKKNSTYPTIKRSYNNTNQEDLLVLWGIHHPNDAAEQTKLYQNPTTYISVGTSTLNQRLVPRIATRSKVNGQSGRMEFFWTILKPNDAINFESNGNFIAPEYAYKIVKKGDSTIMKSELEYGNCNTKCQTPMGAINSSMPFHNIHPLTIGECPKYVK

SEQ ID NO: 12 - protein, 223 aa, Artificial Sequence
  VN HA1-2
GVKPLILRDCSVAGWLLGNPMCDEFINVPEWSYIVEKANPVNDLCYPGDFNDYEELKHLLSRINHFEKIQIIPKSSWSSHEASLGVSSACPYQGKSSFFRNVVWLIKKNSTYPTIKRSYNNTNQEDLLVLWGIHHPNDAAEQTKLYQNPTTYISVGTSTLNQRLVPRIATRSKVNGQSGRMEFFWTILKPNDAINFESNGNFIAPEYAYKIVKKGDSTIMKSE

SEQ ID NO: 13 - protein, 174 aa, Artificial Sequence
  VN HA1-3
NDLCYPGDFNDYEELKHLLSRINHFEKIQIIPKSSWSSHEASLGVSSACPYQGKSSFFRNVVWLIKKNSTYPTIKRSYNNTNQEDLLVLWGIHHPNDAAEQTKLYQNPTTYISVGTSTLNQRLVPRIATRSKVNGQSGRMEFFWTILKPNDAINFESNGNFIAPEYAYKIVKKG

SEQ ID NO: 14 - protein, 274 aa, Artificial Sequence
  IND HA1-1
EKTHNGKLCDLDGVKPLILRDCSVAGWLLGNPMCDEFINVPEWSYIVEKANPTNDLCYPGSFNDYEELKHLLSRINHFEKIQIIPKSSWSDHEASSGVSSACPYLGSPSFFRNVVWLIKKNSTYPTIKKSYNNTNQEDLLVLWGIHHPNDAAEQTRLYQNPTTYISIGTSTLNQRLVPKIATRSKVNGQSGRMEFFWTILKPNDAINFESNGNFIAPEYAYKIVKKGDSAIMKSELEYGNCNTKCQTPMGAINSSMPFHNIHPLTIGECPKYVK

SEQ ID NO: 15 - protein, 223 aa, Artificial Sequence
  IND HA1-2
GVKPLILRDCSVAGWLLGNPMCDEFINVPEWSYIVEKANPTNDLCYPGSFNDYEELKHLLSRINHFEKIQIIPKSSWSDHEASSGVSSACPYLGSPSFFRNVVWLIKKNSTYPTIKKSYNNTNQEDLLVLWGIHHPNDAAEQTRLYQNPTTYISIGTSTLNQRLVPKIATRSKVNGQSGRMEFFWTILKPNDAINFESNGNFIAPEYAYKIVKKGDSAIMKSE

SEQ ID NO: 16 - protein, 174 aa, Artificial Sequence
  IND HA1-3
NDLCYPGSFNDYEELKHLLSRINHFEKIQIIPKSSWSDHEASSGVSSACPYLGSPSFFRNVVWLIKKNSTYPTIKKSYNNTNQEDLLVLWGIHHPNDAAEQTRLYQNPTTYISIGTSTLNQRLVPKIATRSKVNGQSGRMEFFWTILKPNDAINFESNGNFIAPEYAYKIVKKG

SEQ ID NO: 17 - protein, 272 aa, Artificial Sequence
  NC HA1-1
SHNGKLCLLKGIAPLQLGNCSVAGWILGNPECELLISKESWSYIVETPNPENGTCYPGYFADYEELREQLSSVSSFERFEIFPKESSWPNHTVTGVSASCSHNGKSSFYRNLLWLTGKNGLYPNLSKSYVNNKEKEVLVLWGVHHPPNIGNQRALYHTENAYVSVVSSHYSRRFTPEIAKRPKVRDQEGRINYYWTLLEPGDTIIFEANGNLIAPWYAFALSRGFGSGIITSNAPMDECDAKCQTPQGAINSSLPFQNVHPVTIGECPKYVR

SEQ ID NO: 18 - protein, 223 aa, Artificial Sequence
  NC HA1-2
KGIAPLQLGNCSVAGWILGNPECELLISKESWSYIVETPNPENGTCYPGYFADYEELREQLSSVSSFERFEIFPKESSWPNHTVTGVSASCSHNGKSSFYRNLLWLTGKNGLYPNLSKSYVNNKEKEVLVLWGVHHPPNIGNQRALYHTENAYVSVVSSHYSRRFTPEIAKRPKVRDQEGRINYYWTLLEPGDTIIFEANGNLIAPWYAFALSRGFGSGIITS

SEQ ID NO: 19 - protein, 176 aa, Artificial Sequence
  NC HA1-3
NPENGTCYPGYFADYEELREQLSSVSSFERFEIFPKESSWPNHTVTGVSASCSHNGKSSFYRNLLWLTGKNGLYPNLSKSYVNNKEKEVLVLWGVHHPPNIGNQRALYHTENAYVSVVSSHYSRRFTPEIAKRPKVRDQEGRINYYWTLLEPGDTIIFEANGNLIAPWYAFALSRG

SEQ ID NO: 20 - protein, 267 aa, Artificial Sequence
  WIS HA1-1
QSSSTGGICDSPHQILDGENCTLIDALLGDPQCDGFQNKKWDLFVERSKAYSNCYPYDVPDYASLRSLVASSGTLEFNDESFNWTGVTQNGTSSACKRRSNNSFFSRLNWLTHLKFKYPALNVTMPNNEKFDKLYIWGVHHPGTDNDQIFLHAQASGRITVSTKRSQQTVIPNIGSRPRIRNIPSRISIYWTIVKPGDILLINSTGNLIAPRGYFKIRSGKSSIMRSDAPIGKCNSECITPNGSIPNDKPFQNVNRITYGACPRYVK

SEQ ID NO: 21 - protein, 218 aa, Artificial Sequence
  WIS HA1-2
SPHQILDGENCTLIDALLGDPQCDGFQNKKWDLFVERSKAYSNCYPYDVPDYASLRSLVASSGTLEFNDESFNWTGVTQNGTSSACKRRSNNSFFSRLNWLTHLKFKYPALNVTMPNNEKFDKLYIWGVHHPGTDNDQIFLHAQASGRITVSTKRSQQTVIPNIGSRPRIRNIPSRISIYWTIVKPGDILLINSTGNLIAPRGYFKIRSGKSSIMRSD

SEQ ID NO: 22 - protein, 169 aa, Artificial Sequence
  WIS HA1-3
SNCYPYDVPDYASLRSLVASSGTLEFNDESFNWTGVTQNGTSSACKRRSNNSFFSRLNWLTHLKFKYPALNVTMPNNEKFDKLYIWGVHHPGTDNDQIFLHAQASGRITVSTKRSQQTVIPNIGSRPRIRNIPSRISIYWTIVKPGDILLINSTGNLIAPRGYFKIRSG

SEQ ID NO: 23 - protein, 511 aa, Influenza A/Puerto Rico/8/34 HA0s
DTICIGYHANNSTDTVDTVLEKNVTVTHSVNLLEDSHNGKLCRLKGIAPLQLGKCNIAGWLLGNPECDPLLPVRSWSYIVETPNSENGICYPGDFIDYEELREQLSSVSSFERFEIFPKESSWPNHNTNGVTAACSHEGKSSFYRNLLWLTEKEGSYPKLKNSYVNKKGKEVLVLWGIHHPPNSKEQQNLYQNENAYVSVVTSNYNRRFTPEIAERPKVRDQAGRMNYYWTLLKPGDTIIFEANGNLIAPMYAFALSRGFGSGIITSNASMHECNTKCQTPLGAINSSLPYQNIHPVTIGECPKYVRSAKLRMVTGLRNIPSIQSRGLFGAIAGFIEGGWTGMIDGWYGYHHQNEQGSGYAADQKSTQNAINGITNKVNTVIEKMNIQFTAVGKEFNKLEKRMENLNKKVDDGFLDIWTYNAELLVLLENERTLDFHDSNVKNLYEKVKSQLKNNAKEIGNGCFEFYHKCDNECMESVRNGTYDYPKYSEESKLNREKVDGVKLESMGIYQ

SEQ ID NO: 24 - protein, 223 aa, Artificial Sequence
  PR/8 HA1-2mut
KGAAPLQLGKCNIAGWLLGNPECDPLLPVRSWSDIAETPNSENGICYPGDFIDYEELREQLSSVSSFERFEIFPKESSWPNHNTNGVTAACSHEGKSSFYRNLLWLTEKEGSYPKLKNSYVNKKGKEVLVLWGIHHPPNSKEQQNLYQNENAYVSVVTSNYNRRFTPEIAERPKVRDQAGRMNYYWTLLKPGDTIIFEANGNLIAPMYAFALSRGFGSGIITS

SEQ ID NO: 25 - protein, 176 aa, Artificial Sequence
  PR/8 HA1-3mut
NSENEICYPGDFIDKEELREQLSSVSSFERFEIFPKESSWPNHNTNGVTAACSHEGKSSFYRNLLWLTEKEGSYPKLKNSYVNKKGKEVLVLWGIHHPPNSKEQQNLYQNENAYVSVVTSNYNRRFTPEIAERPKVRDQAGRMNYYWTLLKPGDTIIFEANGNLIAPMYAAALSRG

SEQ ID NO: 26 - protein, 223 aa, Artificial Sequence
  VN HA1-2mut
GAKPLSLRDCSVAGWLLGNPMCDEFINVPEWSDIAEKANPVNDLCYPGDFNDYEELKHLLSRINHFEKIQIIPKSSWSSHEASLGVSSACPYQGKSSFFRNVVWLIKKNSTYPTIKRSYNNTNQEDLLVLWGIHHPNDAAEQTKLYQNPTTYISVGTSTLNQRLVPRIATRSKVNGQSGRMEFFWTILKPNDAINFESNGNFIAPEYAYKIVKKGDSTIMKSE

SEQ ID NO: 27 - protein, 174 aa, Artificial Sequence
  VN HA1-3mut
NDLCYPGDFNDKEELKHLLSRINHFEKIQIIPKSSWSSHEASLGVSSACPYQGKSSFFRNVVWLIKKNSTYPTIKRSYNNTNQEDLLVLWGIHHPNDAAEQTKLYQNPTTYISVGTSTLNQRLVPRIATRSKVNGQSGRMEFFWTILKPNDAINFESNGNFIAPEYAYKIAKKG

SEQ ID NO: 28 - protein, 223 aa, Artificial Sequence
  IND HA1-2mut
GAKPLSLRDCSVAGWLLGNPMCDEFINVPEWSDIAEKANPTNDLCYPGSFNDYEELKHLLSRINHFEKIQIIPKSSWSDHEASSGVSSACPYLGSPSFFRNVVWLIKKNSTYPTIKKSYNNTNQEDLLVLWGIHHPNDAAEQTRLYQNPTTYISIGTSTLNQRLVPKIATRSKVNGQSGRMEFFWTILKPNDAINFESNGNFIAPEYAYKIVKKGDSAIMKSE

SEQ ID NO: 29 - protein, 174 aa, Artificial Sequence
  IND HA1-3mut
NDLCYPGSFNDKEELKHLLSRINHFEKIQIIPKSSWSDHEASSGVSSACPYLGSPSFFRNVVWLIKKNSTYPTIKKSYNNTNQEDLLVLWGIHHPNDAAEQTRLYQNPTTYISIGTSTLNQRLVPKIATRSKVNGQSGRMEFFWTILKPNDAINFESNGNFIAPEYAYKIAKKG

SEQ ID NO: 30 - protein, 223 aa, Artificial Sequence
  NC HA1-2mut
KGAAPLQLGNCSVAGWILGNPECELLISKESWSDIAETPNPENGTCYPGYFADYEELREQLSSVSSFERFEIFPKESSWPNHTVTGVSASCSHNGKSSFYRNLLWLTGKNGLYPNLSKSYVNNKEKEVLVLWGVHHPPNIGNQRALYHTENAYVSVVSSHYSRRFTPEIAKRPKVRDQEGRINYYWTLLEPGDTIIFEANGNLIAPWYAFALSRGFGSGIITS

SEQ ID NO: 31 - protein, 176 aa, Artificial Sequence
  NC HA1-3mut
NPENETCYPGYFADKEELREQLSSVSSFERFEIFPKESSWPNHTVTGVSASCSHNGKSSFYRNLLWLTGKNGLYPNLSKSYVNNKEKEVLVLWGVHHPPNIGNQRALYHTENAYVSVVSSHYSRRFTPEIAKRPKVRDQEGRINYYWTLLEPGDTIIFEANGNLIAPWYAAALSRG

SEQ ID NO: 32 - protein, 218 aa, Artificial Sequence
  WIS HA1-2mut
SPHQALDGENCTLIDALLGDPQCDGFQNKKWDDFAERSKAYSNCYPYDVPDYASLRSLVASSGTLEFNDESFNWTGVTQNGTSSACKRRSNNSFFSRLNWLTHLKFKYPALNVTMPNNEKFDKLYIWGVHHPGTDNDQIFLHAQASGRITVSTKRSQQTVIPNIGSRPRIRNIPSRISIYWTIVKPGDILLINSTGNLIAPRGYFKIRSGKSSIMRSD

SEQ ID NO: 33 - protein, 169 aa, Artificial Sequence
  WIS HA1-3mut
SNCYPKDSPDEASLRSLVASSGTDEFNDESFNWTGVTQNGTSSACKRRSNNSFFSRLNWLTHLKFKYPALNVTMPNNEKFDKLYIWGVHHPGTDNDQIFLHAQASGRITVSTKRSQQTVIPNIGSRPRIRNIPSRISIYWTIVKPGDILLINSTGNLIAPRGYFKIRSG

SEQ ID NO: 34 - protein, 320 aa, Influenza A/Swine/Hong Kong/9/98 HA
DKICIGYQSTNSTETVDTLTETNVPVTHAKELLHTEHNGMLCATNLGHPLILDTCTIEGLIYGNPSCDLLLGGREWSYIVERPSAVNGMCYPGNVENLEELRSLFSSASSYQRIQIFPDTIWNVSYSGTSKACSDSFYRSMRWLTQKNNAYPIQDAQYTNNRGKSILFMWGINHPPTDTVQTNLYTRTDTTTSVTTEDINRTFKPVIGPRPLVNGLHGRIDYYWSVLKPGQTLRVRSNGNLIAPWYGHILSGESHGRILKTDLNSGNCVVQCQTERGGLNTTLPFHNVSKYAFGNCPKYVGVKSLKLAVGLRNVPARSSR

SEQ ID NO: 35 - protein, 566 aa, Influenza A//Aichi/2/1968 HA
MKTIIALSYIFCLALGQDLPGNDNSTATLCLGHHAVPNGTLVKTITDDQIEVTNATELVQSSSTGKICNNPHRILDGIDCTLIDALLGDPHCDVFQNETWDLFVERSKAFSNCYPYDVPDYASLRSLVASSGTLEFITEGFTWTGVTQNGGSNACKRGPGSGFFSRLNWLTKSGSTYPVLNVTMPNNDNFDKLYIWGIHHPSTNQEQTSLYVQASGRVTVSTRRSQQTIIPNIGSRPWVRGLSSRISIYWTIVKPGDVLVINSNGNLIAPRGYFKMRTGKSSIMRSDAPIDTCISECITPNGSIPNDKPFQNVNKITYGACPKYVKQNTLKLATGMRNVPEKQTRGLFGAIAGFIENGWEGMIDGWYGFRHQNSEGTGQAADLKSTQAAIDQINGKLNRVIEKTNEKFHQIEKEFSEVEGRIQDLEKYVEDTKIDLWSYNAELLVALENQHTIDLTDSEMNKLFEKTRRQLRENAEEMGNGCFKIYHKCDNACIESIRNGTYDHDVYRDEALNNRFQIKGVELKSGYKDWILWISFAISCFLLCVVLLGFIMWACQRGNIRCNICI

SEQ ID NO: 36 - protein, 584 aa, Influenza B/Lee/40 HA
MKAIIVLLMVVTSNADRICTGITSSNSPHVVKTATQGEVNVTGVIPLTTTPTKSHFANLKGTQTRGKLCPNCFNCTDLDVALGRPKCMGNTPSAKVSILHEVKPATSGCFPIMHDRTKIRQLPNLLRGYENIRLSTSNVINTETAPGGPYKVGTSGSCPNVANGNGFFNTMAWVIPKDNNKTAINPVTVEVPYICSEGEDQITVWGFHSDDKTQMERLYGDSNPQKFTSSANGVTTHYVSQIGGFPNQTEDEGLKQSGRIVVDYMVQKPGKTGTIVYQRGILLPQKVWCASGRSKVIKGSLPLIGEADCLHEKYGGLNKSKPYYTGEHAKAIGNCPIWVKTPLKLANGTKYRPPAKLLKERGFFGAIAGFLEGGWEGMIAGWHGYTSHGAHGVAVAADLKSTQEAINKITKNLNYLSELEVKNLQRLSGAMNELHDEILELDEKVDDLRADTISSQIELAVLLSNEGIINSEDEHLLALERKLKKMLGPSAVEIGNGCFETKHKCNQTCLDRIAAGTFNAGDFSLPTFDSLNITAASLNDDGLDNHTILLYYSTAASSLAVTLMIAIFIVYMVSRDNVSCSICL

SEQ ID NO: 37 - protein, 655 aa, Influenza C/Johannesburg/1/66
MFFSLLLVLGLTEAEKIKICLQKQVNSSFSLHNGFGGNLYATEEKRMFELVKPKAGASVLNQSTWIGFGDSRTDKSNSAFPRSADVSAKTADKFRSLSGGSLMLSMFGPPGKVDYLYQGCGKHKVFYEGVNWSPHAAINCYRKNWTDIKLNFQKNIYELASQSHCMSLVNALDKTIPLQVTAGTAGNCNNSFLKNPALYTQEVKPSENKCGKENLAFFTLPTQFGTYECKLHLVASCYFIYDSKEVYNKRGCDNYFQVIYDSSGKVVGGLDNRVSPYTGNSGDTPTMQCDMLQLKPGRYSVRSSPRFLLMPERSYCFDMKEKGPVTAVQSIWGKGRESDYAVDQACLSTPGCMLIQKQKPYIGEADDHHGDQEMRELLSGLDYEARCISQSGWVNETSPFTEKYLLPPKFGRCPLAAKEESIPKIPDGLLIPTSGTDTTVTKPKSRIFGIDDLIIGLLFVAIVEAGIGGYLLGSRKESGGGVTKESAEKGFEKIGNDIQILKSSINIAIEKLNDRISHDEQAIRDLTLEIENARSEALLGELGIIRALLVGNISIGLQESLWELASEITNRAGDLAVEVSPGCWIIDNNICDQSCQNFIFKFNETAPVPTIPPLDTKIDLQSDPFYWGSSLGLAITATISLAALVISGIAICRTK

SEQ ID NO: 38 - protein, 293 aa, Artificial Sequence
  B/Lee/40 HA1-1
TTTPTKSHFANLKGTQTRGKLCPNCFNCTDLDVALGRPKCMGNTPSAKVSILHEVKPATSGCFPIMHDRTKIRQLPNLLRGYENIRLSTSNVINTETAPGGPYKVGTSGSCPNVANGNGFFNTMAWVIPKDNNKTAINPVTVEVPYICSEGEDQITVWGFHSDDKTQMERLYGDSNPQKFTSSANGVTTHYVSQIGGFPNQTEDEGLKQSGRIVVDYMVQKPGKTGTIVYQRGILLPQKVWCASGRSKVIKGSLPLIGEADCLHEKYGGLNKSKPYYTGEHAKAIGNCPIWVK

SEQ ID NO: 39 - protein, 240 aa, Artificial Sequence
  B/Lee/40 HA1-2
KGTQTRGKLCPNCFNCTDLDVALGRPKCMGNTPSAKVSILHEVKPATSGCFPIMHDRTKIRQLPNLLRGYENIRLSTSNVINTETAPGGPYKVGTSGSCPNVANGNGFFNTMAWVIPKDNNKTAINPVTVEVPYICSEGEDQITVWGFHSDDKTQMERLYGDSNPQKFTSSANGVTTHYVSQIGGFPNQTEDEGLKQSGRIVVDYMVQKPGKTGTIVYQRGILLPQKVWCASGRSKVIKG

SEQ ID NO: 40 - protein, 267 aa, Artificial Sequence
  A/Aichi/2/68 HA1-1
QSSSTGKICNNPHRILDGIDCTLIDALLGDPHCDVFQNETWDLFVERSKAFSNCYPYDVPDYASLRSLVASSGTLEFITEGFTWTGVTQNGGSNACKRGPGSGFFSRLNWLTKSGSTYPVLNVTMPNNDNFDKLYIWGIHHPSTNQEQTSLYVQASGRVTVSTRRSQQTIIPNIGSRPWVRGLSSRISIYWTIVKPGDVLVINSNGNLIAPRGYFKMRTGKSSIMRSDAPIDTCISECITPNGSIPNDKPFQNVNKITYGACPKYVK

SEQ ID NO: 41 - protein, 216 aa, Artificial Sequence
  A/Aichi/2/68 HA1-2
HRILDGIDCTLIDALLGDPHCDVFQNETWDLFVERSKAFSNCYPYDVPDYASLRSLVASSGTLEFITEGFTWTGVTQNGGSNACKRGPGSGFFSRLNWLTKSGSTYPVLNVTMPNNDNFDKLYIWGIHHPSTNQEQTSLYVQASGRVTVSTRRSQQTIIPNIGSRPWVRGLSSRISIYWTIVKPGDVLVINSNGNLIAPRGYFKMRTGKSSIMRSD

SEQ ID NO: 42 - protein, 358 aa, Influenza B/Malaysia/2506/2004 HA
IVLLMVVTSNADRICTGITSSNSPHVVKTATQGEVNVTGVIPLTTTPTKSHFANLKGTETRGKLCPKCLNCTDLDVALGRPKCTGNIPSARVSILHEVRPVTSGCFPIMHDRTKIRQLPNLLRGYEHIRLSTHNVINAENAPGGSYKIGTSGSCPNVTNGNGFFATMAWAVPKNDNNKTATNSLTIEVPYICTEGEDQITVWGFHSDNEAQMAKLYGDSKPQKFTSSANGVTTHYVSQIGGFPNQTEDGGLPQSGRIVVDYMVQKSGKTGTITYQRGILLPQKVWCASGRSKVIKGSLPLIGEADCLHEKYGGLNKSKPYYTGEHAKAIGNCPIWVKTPLKLANGTKYRPPAKLLKER

SEQ ID NO: 43 - protein, 349 aa, Influenza B/Ohio/1/2005 HA
DRICTGITSSNSPHVVKTATQGEVNVTGVIPLTTTPTKSHFANLKGTKTRGKLCPKCLNCTDLDVALGRPKCTGNIPSAEVSILHEVRPVTSGCFPIMHDRTKIRQLPNLLRGYEHIRLSTHNVINAEKAPGGPYKIGTSGSCPNVTNGNGFFATMAWAVPKNDNNKTATNSLTIEVPYICTEGEDQITIWGFHSDSETQMAKLYGDSKPQKFTSSANGVTTHYVSQIGGFPNQTEDGGLPQSGRIVVDYMVQKSGKTGTITYQRGILLPQKVWCASGRSKVIKGSLPLIGEADCLHEKYGGLNKSKPYYTGEHAKAIGNCPIWVKTPLKLANGTKYRPPAKLLKERGF

SEQ ID NO: 44 - protein, 338 aa, Influenza B/Shanghai/361/2002 HA
DRICTGITSSNSPHVVKTATQGEVNVTGVIPLTTTPIKSHFANLKGTRTRGKLCPDCLNCTDLDVALGRPMCVGTTPSAKASILHEVRPVTSGCFPIMHDRTKIRQLPNLLRGYENIRLSTQNVIDAEKALGGPYRLGTSGSCPNATSKSGFFATMAWAVPKDNNKNATNPLTVEVPYICTEGEDQITVWGFHSDDKTQMKNLYGDSNPQKFTSSANGVTTHYVSQIGGFPDQTEDGGLPQSGRIVVDYMVQKPGKTGTIVYQRGVLLPQKVWCASGRSKVIKGSLPLIGEADCLHEKYGGLNKSKPYYTGEHAKAIGHCPIWVKTPLKLANGTKYRP

SEQ ID NO: 45 - protein, 294 aa, Artificial Sequence
  B/Malaysia/2506/2004 HA1-1
TTTPTKSHFANLKGTETRGKLCPKCLNCTDLDVALGRPKCTGNIPSARVSILHEVRPVTSGCFPIMHDRTKIRQLPNLLRGYEHIRLSTHNVINAENAPGGSYKIGTSGSCPNVTNGNGFFATMAWAVPKNDNNKTATNSLTIEVPYICTEGEDQITVWGFHSDNEAQMAKLYGDSKPQKFTSSANGVTTHYVSQIGGFPNQTEDGGLPQSGRIVVDYMVQKSGKTGTITYQRGILLPQKVWCASGRSKVIKGSLPLIGEADCLHEKYGGLNKSKPYYTGEHAKAIGNCPIWVK

SEQ ID NO: 46 - protein, 241 aa, Artificial Sequence
  B/Malaysia/2506/2004 HA1-2
KGTETRGKLCPKCLNCTDLDVALGRPKCTGNIPSARVSILHEVRPVTSGCFPIMHDRTKIRQLPNLLRGYEHIRLSTHNVINAENAPGGSYKIGTSGSCPNVTNGNGFFATMAWAVPKNDNNKTATNSLTIEVPYICTEGEDQITVWGFHSDNEAQMAKLYGDSKPQKFTSSANGVTTHYVSQIGGFPNQTEDGGLPQSGRIVVDYMVQKSGKTGTITYQRGILLPQKVWCASGRSKVIKG

SEQ ID NO: 47 - protein, 294 aa, Artificial Sequence
  B/Ohio/1/2005 HA1-1
TTTPTKSHFANLKGTKTRGKLCPKCLNCTDLDVALGRPKCTGNIPSAEVSILHEVRPVTSGCFPIMHDRTKIRQLPNLLRGYEHIRLSTHNVINAEKAPGGPYKIGTSGSCPNVTNGNGFFATMAWAVPKNDNNKTATNSLTIEVPYICTEGEDQITIWGFHSDSETQMAKLYGDSKPQKFTSSANGVTTHYVSQIGGFPNQTEDGGLPQSGRIVVDYMVQKSGKTGTITYQRGILLPQKVWCASGRSKVIKGSLPLIGEADCLHEKYGGLNKSKPYYTGEHAKAIGNCPIWVK

SEQ ID NO: 48 - protein, 241 aa, Artificial Sequence
  B/Ohio/1/2005 HA1-2
KGTKTRGKLCPKCLNCTDLDVALGRPKCTGNIPSAEVSILHEVRPVTSGCFPIMHDRTKIRQLPNLLRGYEHIRLSTHNVINAEKAPGGPYKIGTSGSCPNVTNGNGFFATMAWAVPKNDNNKTATNSLTIEVPYICTEGEDQITIWGFHSDSETQMAKLYGDSKPQKFTSSANGVTTHYVSQIGGFPNQTEDGGLPQSGRIVVDYMVQKSGKTGTITYQRGILLPQKVWCASGRSKVIKG

SEQ ID NO: 49 - protein, 293 aa, Artificial Sequence
  B/Shanghai/361/2002 HA1-1
TTTPIKSHFANLKGTRTRGKLCPDCLNCTDLDVALGRPMCVGTTPSAKASILHEVRPVTSGCFPIMHDRTKIRQLPNLLRGYENIRLSTQNVIDAEKALGGPYRLGTSGSCPNATSKSGFFATMAWAVPKDNNKNATNPLTVEVPYICTEGEDQITVWGFHSDDKTQMKNLYGDSNPQKFTSSANGVTTHYVSQIGGFPDQTEDGGLPQSGRIVVDYMVQKPGKTGTIVYQRGVLLPQKVWCASGRSKVIKGSLPLIGEADCLHEKYGGLNKSKPYYTGEHAKAIGHCPIWVK

SEQ ID NO: 50 - protein, 240 aa, Artificial Sequence
  B/Shanghai/361/2002 HA1-2
KGTRTRGKLCPDCLNCTDLDVALGRPMCVGTTPSAKASILHEVRPVTSGCFPIMHDRTKIRQLPNLLRGYENIRLSTQNVIDAEKALGGPYRLGTSGSCPNATSKSGFFATMAWAVPKDNNKNATNPLTVEVPYICTEGEDQITVWGFHSDDKTQMKNLYGDSNPQKFTSSANGVTTHYVSQIGGFPDQTEDGGLPQSGRIVVDYMVQKPGKTGTIVYQRGVLLPQKVWCASGRSKVIKG

SEQ ID NO: 51 - DNA, 1518 bp, Artificial Sequence
  Stf2.b1p
atggcacaagtaatcaacactaacagtctgtcgctgctgacccagaataacctgaacaaatcccagtccgcactgggcaccgctatcgagcgtctgtcttctggtctgcgtatcaacagcgcgaaagacgatgcggcaggtcaggcgattgctaaccgtttcaccgcgaacatcaaaggtctgactcaggcttcccgtaacgctaacgacggtatctccattgcgcagaccactgaaggcgcgctgaacgaaatcaacaacaacctgcagcgtgtgcgtgaactggcggttcagtctgctaacagcaccaactcccagtctgacctcgactccatccaggctgaaatcacccagcgcctgaacgaaatcgaccgtgtatccggccagactcagttcaacggcgtgaaagtcctggcgcaggacaacaccctgaccatccaggttggcgccaacgacggtgaaactatcgatatcgatctgaagcagatcaactctcagaccctgggtctggactcactgaacgtgcagaaagcgtatgatgtgaaagatacagcagtaacaacgaaagcttatgccaataatggtactacactggatgtatcgggtcttgatgatgcagctattaaagcggctacgggtggtacgaatggtacggcttctgtaaccggtggtgcggttaaatttgacgcagataataacaagtactttgttactattggtggctttactggtgctgatgccgccaaaaatggcgattatgaagttaacgttgctactgacggtacagtaacccttgcggctggcgcaactaaaaccacaatgcctgctggtgcgacaactaaaacagaagtacaggagttaaaagatacaccggcagttgtttcagcagatgctaaaaatgccttaattgctggcggcgttgacgctaccgatgctaatggcgctgagttggtcaaaatgtcttataccgataaaaatggtaagacaattgaaggcggttatgcgcttaaagctggcgataagtattacgccgcagattacgatgaagcgacaggagcaattaaagctaaaactacaagttatactgctgctgacggcactaccaaaacagcggctaaccaactgggtggcgtagacggtaaaaccgaagtcgttactatcgacggtaaaacctacaatgccagcaaagccgctggtcatgatttcaaagcacaaccagagctggcggaagcagccgctaaaaccaccgaaaacccgctgcagaaaattgatgccgcgctggcgcaggtggatgcgctgcgctctgatctgggtgcggtacaaaaccgtttcaactctgctatcaccaacctgggcaataccgtaaacaatctgtctgaagcgcgtagccgtatcgaagattccgactacgcgaccgaagtttccaacatgtctcgcgcgcagattctgcagcaggccggtacttccgttctggcgcaggctaaccaggtcccgcagaacgtgctgagcctgttacgt

SEQ ID NO: 52 - DNA, 1539 bp, Artificial Sequence
  STF2.SG
atggcacaagtaatcaacactaacagtctgtcgctgctgacccagaataacctgaacaaatcccagtccgcactgggcaccgctatcgagcgtctgtcttctggtctgcgtatcaacagcgcgaaagacgatgcggcaggtcaggcgattgctaaccgtttcaccgcgaacatcaaaggtctgactcaggcttcccgtaacgctaacgacggtatctccattgcgcagaccactgaaggcgcgctgaacgaaatcaacaacaacctgcagcgtgtgcgtgaactggcggttcagtctgctaacagcaccaactcccagtctgacctcgactccatccaggctgaaatcacccagcgcctgaacgaaatcgaccgtgtatccggccagactcagttcaacggcgtgaaagtcctggcgcaggacaacaccctgaccatccaggttggcgccaacgacggtgaaactatcgatatcgatctgaagcagatcaactctcagaccctgggtctggactcactgaacgtgcagaaagcgtatgatgtgaaagatacagcagtaacaacgaaagcttatgccaataatggtactacactggatgtatcgggtcttgatgatgcagctattaaagcggctacgggtggtacgaatggtacggcttctgtaaccggtggtgcggttaaatttgacgcagataataacaagtactttgttactattggtggctttactggtgctgatgccgccaaaaatggcgattatgaagttaacgttgctactgacggtacagtaacccttgcggctggcgcaactaaaaccacaatgcctgctggtgcgacaactaaaacagaagtacaggagttaaaagatacaccggcagttgtttcagcagatgctaaaaatgccttaattgctggcggcgttgacgctaccgatgctaatggcgctgagttggtcaaaatgtcttataccgataaaaatggtaagacaattgaaggcggttatgcgcttaaagctggcgataagtattacgccgcagattacgatgaagcgacaggagcaattaaagctaaaactacaagttatactgctgctgacggcactaccaaaacagcggctaaccaactgggtggcgtagacggtaaaaccgaagtcgttactatcgacggtaaaacctacaatgccagcaaagccgctggtcatgatttcaaagcacaaccagagctggcggaagcagccgctaaaaccaccgaaaacccgctgcagaaaattgatgccgcgctggcgcaggtggatgcgctgcgctctgatctgggtgcggtacaaaaccgtttcaactctgctatcaccaacctgggcaataccgtaaacaatctgtctgaagcgcgtagccgtatcgaagattccgactacgcgaccgaagtttccaacatgtctcgcgcgcagattctgcagcaggccggtacttccgttctggcgcaggctaaccaggtcccgcagaacgtgctgtctctgttacgtagcggcagtggtagcggatcc

SEQ ID NO: 53 - DNA, 2361 bp, Artificial Sequence
  SFT2.HA1-1 PR8
atggcacaagtaatcaacactaacagtctgtcgctgctgacccagaataacctgaacaaatcccagtccgcactgggcaccgctatcgagcgtctgtcttctggtctgcgtatcaacagcgcgaaagacgatgcggcaggtcaggcgattgctaaccgtttcaccgcgaacatcaaaggtctgactcaggcttcccgtaacgctaacgacggtatctccattgcgcagaccactgaaggcgcgctgaacgaaatcaacaacaacctgcagcgtgtgcgtgaactggcggttcagtctgctaacagcaccaactcccagtctgacctcgactccatccaggctgaaatcacccagcgcctgaacgaaatcgaccgtgtatccggccagactcagttcaacggcgtgaaagtcctggcgcaggacaacaccctgaccatccaggttggcgccaacgacggtgaaactatcgatatcgatctgaagcagatcaactctcagaccctgggtctggactcactgaacgtgcagaaagcgtatgatgtgaaagatacagcagtaacaacgaaagcttatgccaataatggtactacactggatgtatcgggtcttgatgatgcagctattaaagcggctacgggtggtacgaatggtacggcttctgtaaccggtggtgcggttaaatttgacgcagataataacaagtactttgttactattggtggctttactggtgctgatgccgccaaaaatggcgattatgaagttaacgttgctactgacggtacagtaacccttgcggctggcgcaactaaaaccacaatgcctgctggtgcgacaactaaaacagaagtacaggagttaaaagatacaccggcagttgtttcagcagatgctaaaaatgccttaattgctggcggcgttgacgctaccgatgctaatggcgctgagttggtcaaaatgtcttataccgataaaaatggtaagacaattgaaggcggttatgcgcttaaagctggcgataagtattacgccgcagattacgatgaagcgacaggagcaattaaagctaaaaccacaagttatactgctgctgacggcactaccaaaacagcggctaaccaactgggtggcgtagacggtaaaaccgaagtcgttactatcgacggtaaaacctacaatgccagcaaagccgctggtcatgatttcaaagcacaaccagagctggcggaagcagccgctaaaaccaccgaaaacccgctgcagaaaattgatgccgcgctggcgcaggtggatgcgctgcgctctgatctgggtgcggtacaaaaccgtttcaactctgctatcaccaacctgggcaataccgtaaacaatctgtctgaagcgcgtagccgtatcgaagattccgactacgcgaccgaagtttccaacatgtctcgcgcgcagattttgcagcaggccggtacttccgttctggcgcaggctaaccaggtcccgcagaacgtgctgtctctgttacgtagcggcagtggtagcggatcctctcataacggtaaactgtgtcgtctgaaaggtattgcaccactgcagctgggcaaatgcaacatcgcgggttggctgctgggtaaccctgaatgtgacccgctgctgccggttcgttcctggagctacattgttgaaaccccgaactccgaaaacggtatctgctacccgggcgactttattgactatgaagaactgcgtgagcagctgtcttccgtgagcagctttgaacgcttcgaaatcttcccgaaggaaagctcctggccgaaccacaacactaacggcgtgacggcggcttgctcccacgaaggcaaatcttccttttatcgtaacctgctgtggctgactgaaaaggaaggttcctacccaaaactgaaaaacagctatgttaacaaaaagggtaaagaagtcctggtgctgtggggcatccaccacccgccgaactccaaggaacagcagaatctgtatcagaacgaaaacgcatacgtttctgtcgttacttccaactataaccgtcgtttcactccggaaatcgcggaacgtccgaaagtacgcgaccaggctggccgtatgaactactactggaccctgctgaaaccgggtgacactattatcttcgaagctaacggtaacctgatcgcaccaatgtacgctttcgcactgtctcgtggtttcggttccggcattatcaccagcaacgcgtctatgcacgaatgcaacacgaaatgtcagacgccgctgggcgcaattaatagcagcctgccgtaccagaacatccacccggtgactatcggcgaatgcccgaagtatgttcgttaatag

SEQ ID NO: 54 - DNA, 2379 bp, Artificial Sequence
  STF2.HA1-1.his PR8
atggcacaagtaatcaacactaacagtctgtcgctgctgacccagaataacctgaacaaatcccagtccgcactgggcaccgctatcgagcgtctgtcttctggtctgcgtatcaacagcgcgaaagacgatgcggcaggtcaggcgattgctaaccgtttcaccgcgaacatcaaaggtctgactcaggcttcccgtaacgctaacgacggtatctccattgcgcagaccactgaaggcgcgctgaacgaaatcaacaacaacctgcagcgtgtgcgtgaactggcggttcagtctgctaacagcaccaactcccagtctgacctcgactccatccaggctgaaatcacccagcgcctgaacgaaatcgaccgtgtatccggccagactcagttcaacggcgtgaaagtcctggcgcaggacaacaccctgaccatccaggttggcgccaacgacggtgaaactatcgatatcgatctgaagcagatcaactctcagaccctgggtctggactcactgaacgtgcagaaagcgtatgatgtgaaagatacagcagtaacaacgaaagcttatgccaataatggtactacactggatgtatcgggtcttgatgatgcagctattaaagcggctacgggtggtacgaatggtacggcttctgtaaccggtggtgcggttaaatttgacgcagataataacaagtactttgttactattggtggctttactggtgctgatgccgccaaaaatggcgattatgaagttaacgttgctactgacggtacagtaacccttgcggctggcgcaactaaaaccacaatgcctgctggtgcgacaactaaaacagaagtacaggagttaaaagatacaccggcagttgtttcagcagatgctaaaaatgccttaattgctggcggcgttgacgctaccgatgctaatggcgctgagttggtcaaaatgtcttataccgataaaaatggtaagacaattgaaggcggttatgcgcttaaagctggcgataagtattacgccgcagattacgatgaagcgacaggagcaattaaagctaaaaccacaagttatactgctgctgacggcactaccaaaacagcggctaaccaactgggtggcgtagacggtaaaaccgaagtcgttactatcgacggtaaaacctacaatgccagcaaagccgctggtcatgatttcaaagcacaaccagagctggcggaagcagccgctaaaaccaccgaaaacccgctgcaaaaaattgatgccgcgctggcgcaggtggatgcgctgcgctctgatctgggtgcggtacaaaaccgtttcaactctgctatcaccaacctgggcaataccgtaaacaatctgtctgaagcgcgtagccgtatcgaagattccgactacgcgaccgaagtttccaacatgtctcgcgcgcagattttgcagcaggccggtacttccgttctggcgcaggctaaccaggtcccgcagaacgtgctgtctctgttacgtagcggcagtggtagcggatcctctcataacggtaaactgtgtcgtctgaaaggtattgcaccactgcagctgggcaaatgcaacatcgcgggttggctgctgggtaaccctgaatgtgacccgctgctgccggttcgttcctggagctacattgttgaaaccccgaactccgaaaacggtatctgctacccgggcgactttattgactatgaagaactgcgtgagcagctgtcttccgtgagcagctttgaacgcttcgaaatcttcccgaaggaaagctcctggccgaaccacaacactaacggcgtgacggcggcttgctcccacgaaggcaaatcttccttttatcgtaacctgctgtggctgactgaaaaggaaggttcctacccaaaactgaaaaacagctatgttaacaaaaagggtaaagaagtcctggtgctgtggggcatccaccacccgccgaactccaaggaacagcagaatctgtatcagaacgaaaacgcatacgtttctgtcgttacttccaactataaccgtcgtttcactccggaaatcgcggaacgtccgaaagtacgcgaccaggctggccgtatgaactactactggaccctgctgaaaccgggtgacactattatcttcgaagctaacggtaacctgatcgcaccaatgtacgctttcgcactgtctcgtggtttcggttccggcattatcaccagcaacgcgtctatgcacgaatgcaacacgaaatgtcagacgccgctgggcgcaattaatagcagcctgccgtaccagaacatccacccggtgactatcggcgaatgcccgaagtatgttcgtcatcaccatcatcaccattaatag

SEQ ID NO: 55 - DNA, 2214 bp, Artificial Sequence
  STF2.HA1-2 PR8
atggcacaagtaatcaacactaacagtctgtcgctgctgacccagaataacctgaacaaatcccagtccgcactgggcaccgctatcgagcgtctgtcttctggtctgcgtatcaacagcgcgaaagacgatgcggcaggtcaggcgattgctaaccgtttcaccgcgaacatcaaaggtctgactcaggcttcccgtaacgctaacgacggtatctccattgcgcagaccactgaaggcgcgctgaacgaaatcaacaacaacctgcagcgtgtgcgtgaactggcggttcagtctgctaacagcaccaactcccagtctgacctcgactccatccaggctgaaatcacccagcgcctgaacgaaatcgaccgtgtatccggccagactcagttcaacggcgtgaaagtcctggcgcaggacaacaccctgaccatccaggttggcgccaacgacggtgaaactatcgatatcgatctgaagcagatcaactctcagaccctgggtctggactcactgaacgtgcagaaagcgtatgatgtgaaagatacagcagtaacaacgaaagcttatgccaataatggtactacactggatgtatcgggtcttgatgatgcagctattaaagcggctacgggtggtacgaatggtacggcttctgtaaccggtggtgcggttaaatttgacgcagataataacaagtactttgttactattggtggctttactggtgctgatgccgccaaaaatggcgattatgaagttaacgttgctactgacggtacagtaacccttgcggctggcgcaactaaaaccacaatgcctgctggtgcgacaactaaaacagaagtacaggagttaaaagatacaccggcagttgtttcagcagatgctaaaaatgccttaattgctggcggcgttgacgctaccgatgctaatggcgctgagttggtcaaaatgtcttataccgataaaaatggtaagacaattgaaggcggttatgcgcttaaagctggcgataagtattacgccgcagattacgatgaagcgacaggagcaattaaagctaaaactacaagttatactgctgctgacggcactaccaaaacagcggctaaccaactgggtggcgtagacggtaaaaccgaagtcgttactatcgacggtaaaacctacaatgccagcaaagccgctggtcatgatttcaaagcacaaccagagctggcggaagcagccgctaaaaccaccgaaaacccgctgcagaaaattgatgccgcgctggcgcaggtggatgcgctgcgctctgatctgggtgcggtacaaaaccgtttcaactctgctatcaccaacctgggcaataccgtaaacaatctgtctgaagcgcgtagccgtatcgaagattccgactacgcgaccgaagtttccaacatgtctcgcgcgcagattctgcagcaggccggtacttccgttctggcgcaggctaaccaggtcccgcagaacgtgctgtctctgttacgttctggttctggttctggttctaaaggtattgctccactgcaactgggtaaatgcaatattgcgggttggctgctgggcaacccggaatgcgatccgctgctgccggtccgttcctggagctatattgttgaaactccgaactctgagaacggcatctgctatccaggtgatttcattgactatgaggaactgcgtgaacaactgtcttccgtgtcttcctttgaacgtttcgagatttttcctaaagaatcttcttggccgaaccataacactaatggtgttaccgctgcgtgctctcatgaaggtaaatctagcttttaccgcaacctgctgtggctgaccgagaaagaaggttcttacccgaaactgaaaaacagctacgtaaacaaaaagggcaaggaagttctggtcctgtggggtatccaccatccgccgaacagcaaggaacagcagaatctgtatcagaacgaaaacgcatacgtatctgttgttacttctaactacaaccgccgtttcacccctgaaatcgcggaacgtccgaaagtgcgtgaccaggcaggccgcatgaactattactggaccctgctgaagccgggtgatactatcatcttcgaagcgaacggtaacctgatcgccccgatgtacgcgttcgctctgagccgtggcttcggctctggtatcattacgtcttaataa

SEQ ID NO: 56 - DNA, 2214 bp, Artificial Sequence
  STF2.HA1-2mut PR8
atggcacaagtaatcaacactaacagtctgtcgctgctgacccagaataacctgaacaaatcccagtccgcactgggcaccgctatcgagcgtctgtcttctggtctgcgtatcaacagcgcgaaagacgatgcggcaggtcaggcgattgctaaccgtttcaccgcgaacatcaaaggtctgactcaggcttcccgtaacgctaacgacggtatctccattgcgcagaccactgaaggcgcgctgaacgaaatcaacaacaacctgcagcgtgtgcgtgaactggcggttcagtctgctaacagcaccaactcccagtctgacctcgactccatccaggctgaaatcacccagcgcctgaacgaaatcgaccgtgtatccggccagactcagttcaacggcgtgaaagtcctggcgcaggacaacaccctgaccatccaggttggcgccaacgacggtgaaactatcgatatcgatctgaagcagatcaactctcagaccctgggtctggactcactgaacgtgcagaaagcgtatgatgtgaaagatacagcagtaacaacgaaagcttatgccaataatggtactacactggatgtatcgggtcttgatgatgcagctattaaagcggctacgggtggtacgaatggtacggcttctgtaaccggtggtgcggttaaatttgacgcagataataacaagtactttgttactattggtggctttactggtgctgatgccgccaaaaatggcgattatgaagttaacgttgctactgacggtacagtaacccttgcggctggcgcaactaaaaccacaatgcctgctggtgcgacaactaaaacagaagtacaggagttaaaagatacaccggcagttgtttcagcagatgctaaaaatgccttaattgctggcggcgttgacgctaccgatgctaatggcgctgagttggtcaaaatgtcttataccgataaaaatggtaagacaattgaaggcggttatgcgcttaaagctggcgataagtattacgccgcagattacgatgaagcgacaggagcaattaaagctaaaaccacaagttatactgctgctgacggcactaccaaaacagcggctaaccaactgggtggcgtagacggtaaaaccgaagtcgttactatcgacggtaaaacctacaatgccagcaaagccgctggtcatgatttcaaagcacaaccagagctggcggaagcagccgctaaaaccaccgaaaacccgctgcagaaaattgatgccgcgctggcgcaggtggatgcgctgcgctctgatctgggtgcggtacaaaaccgtttcaactctgctatcaccaacctgggcaataccgtaaacaatctgtctgaagcgcgtagccgtatcgaagattccgactacgcgaccgaagtttccaacatgtctcgcgcgcagattttgcagcaggccggtacttccgttctggcgcaggctaaccaggtcccgcagaacgtgctgtctctgttagcgagcggcagtggtagcggatccaaaggtgcggctccactgcaactgggtaaatgcaatattgcgggttggctgctgggcaacccggaatgcgatccgctgctgccggtccgttcctggagcgatattgcggaaactccgaactctgagaacggcatctgctatccaggtgatttcattgactatgaggaactgcgtgaacaactgtcttccgtgtcttcctttgaacgtttcgagatttttcctaaagaatcttcttggccgaaccataacactaatggtgttaccgctgcgtgctctcatgaaggtaaatctagcttttaccgcaacctgctgtggctgaccgagaaagaaggttcttacccgaaactgaaaaacagctacgtaaacaaaaagggcaaggaagttctggtcctgtggggtatccaccatccgccgaacagcaaggaacagcagaatctgtatcagaacgaaaacgcatacgtatctgttgttacttctaactacaaccgccgtttcacccctgaaatcgcggaacgtccgaaagtgcgtgaccaggcaggccgcatgaactattactggaccctgctgaagccgggtgatactatcatcttcgaagcgaacggtaacctgatcgccccgatgtacgcgttcgctctgagccgtggcttcggctctggtatcattacgtcttaataa

SEQ ID NO: 57 - DNA, 2073 bp, Artificial Sequence
  STF2.HA1-3 PR8
atggcacaagtaatcaacactaacagtctgtcgctgctgacccagaataacctgaacaaatcccagtccgcactgggcaccgctatcgagcgtctgtcttctggtctgcgtatcaacagcgcgaaagacgatgcggcaggtcaggcgattgctaaccgtttcaccgcgaacatcaaaggtctgactcaggcttcccgtaacgctaacgacggtatctccattgcgcagaccactgaaggcgcgctgaacgaaatcaacaacaacctgcagcgtgtgcgtgaactggcggttcagtctgctaacagcaccaactcccagtctgacctcgactccatccaggctgaaatcacccagcgcctgaacgaaatcgaccgtgtatccggccagactcagttcaacggcgtgaaagtcctggcgcaggacaacaccctgaccatccaggttggcgccaacgacggtgaaactatcgatatcgatctgaagcagatcaactctcagaccctgggtctggactcactgaacgtgcagaaagcgtatgatgtgaaagatacagcagtaacaacgaaagcttatgccaataatggtactacactggatgtatcgggtcttgatgatgcagctattaaagcggctacgggtggtacgaatggtacggcttctgtaaccggtggtgcggttaaatttgacgcagataataacaagtactttgttactattggtggctttactggtgctgatgccgccaaaaatggcgattatgaagttaacgttgctactgacggtacagtaacccttgcggctggcgcaactaaaaccacaatgcctgctggtgcgacaactaaaacagaagtacaggagttaaaagatacaccggcagttgtttcagcagatgctaaaaatgccttaattgctggcggcgttgacgctaccgatgctaatggcgctgagttggtcaaaatgtcttataccgataaaaatggtaagacaattgaaggcggttatgcgcttaaagctggcgataagtattacgccgcagattacgatgaagcgacaggagcaattaaagctaaaactacaagttatactgctgctgacggcactaccaaaacagcggctaaccaactgggtggcgtagacggtaaaaccgaagtcgttactatcgacggtaaaacctacaatgccagcaaagccgctggtcatgatttcaaagcacaaccagagctggcggaagcagccgctaaaaccaccgaaaacccgctgcagaaaattgatgccgcgctggcgcaggtggatgcgctgcgctctgatctgggtgcggtacaaaaccgtttcaactctgctatcaccaacctgggcaataccgtaaacaatctgtctgaagcgcgtagccgtatcgaagattccgactacgcgaccgaagtttccaacatgtctcgcgcgcagattctgcagcaggccggtacttccgttctggcgcaggctaaccaggtcccgcagaacgtgctgtctctgttacgttctggtagcggttctggctctaactctgaaaatggtatctgttacccgggtgatttcatcgattatgaggaactgcgtgaacagctgtctagcgtgagctcctttgaacgcttcgaaatcttcccgaaggaatctagctggccgaaccataacacgaacggtgtgaccgctgcttgctcccacgaaggtaagagctccttctaccgcaatctgctgtggctgactgaaaaagaaggtagctacccgaaactgaaaaattcttacgtcaacaagaaaggcaaggaagtgctggttctgtggggcattcaccacccaccgaacagcaaagagcaacagaacctgtaccaaaatgagaacgcttacgtttctgttgtgacttctaactacaatcgtcgctttacccctgaaatcgcggagcgtccaaaagtgcgtgaccaggctggtcgtatgaactactattggaccctgctgaaaccgggcgacaccattatctttgaagcgaacggtaacctgatcgcgcctatgtacgcgttcgctctgtctcgtggctaataa

SEQ ID NO: 58 - DNA, 2073 bp, Artificial Sequence
  STF2.HA1-3mut PR8
atggcacaagtaatcaacactaacagtctgtcgctgctgacccagaataacctgaacaaatcccagtccgcactgggcaccgctatcgagcgtctgtcttctggtctgcgtatcaacagcgcgaaagacgatgcggcaggtcaggcgattgctaaccgtttcaccgcgaacatcaaaggtctgactcaggcttcccgtaacgctaacgacggtatctccattgcgcagaccactgaaggcgcgctgaacgaaatcaacaacaacctgcagcgtgtgcgtgaactggcggttcagtctgctaacagcaccaactcccagtctgacctcgactccatccaggctgaaatcacccagcgcctgaacgaaatcgaccgtgtatccggccagactcagttcaacggcgtgaaagtcctggcgcaggacaacaccctgaccatccaggttggcgccaacgacggtgaaactatcgatatcgatctgaagcagatcaactctcagaccctgggtctggactcactgaacgtgcagaaagcgtatgatgtgaaagatacagcagtaacaacgaaagcttatgccaataatggtactacactggatgtatcgggtcttgatgatgcagctattaaagcggctacgggtggtacgaatggtacggcttctgtaaccggtggtgcggttaaatttgacgcagataataacaagtactttgttactattggtggctttactggtgctgatgccgccaaaaatggcgattatgaagttaacgttgctactgacggtacagtaacccttgcggctggcgcaactaaaaccacaatgcctgctggtgcgacaactaaaacagaagtacaggagttaaaagatacaccggcagttgtttcagcagatgctaaaaatgccttaattgctggcggcgttgacgctaccgatgctaatggcgctgagttggtcaaaatgtcttataccgataaaaatggtaagacaattgaaggcggttatgcgcttaaagctggcgataagtattacgccgcagattacgatgaagcgacaggagcaattaaagctaaaactacaagttatactgctgctgacggcactaccaaaacagcggctaaccaactgggtggcgtagacggtaaaaccgaagtcgttactatcgacggtaaaacctacaatgccagcaaagccgctggtcatgatttcaaagcacaaccagagctggcggaagcagccgctaaaaccaccgaaaacccgctgcagaaaattgatgccgcgctggcgcaggtggatgcgctgcgctctgatctgggtgcggtacaaaaccgtttcaactctgctatcaccaacctgggcaataccgtaaacaatctgtctgaagcgcgtagccgtatcgaagattccgactacgcgaccgaagtttccaacatgtctcgcgcgcagattctgcagcaggccggtacttccgttctggcgcaggctaaccaggtcccgcagaacgtgctgtctctgttacgtagcggcagtggtagcggatccaactctgaaaatgaaatctgttacccgggtgatttcatcgataaagaggaactgcgtgaacagctgtctagcgtgagctcctttgaacgcttcgaaatcttcccgaaggaatctagctggccgaaccataacacgaacggtgtgaccgctgcttgctcccacgaaggtaagagctccttctaccgcaatctgctgtggctgactgaaaaagaaggtagctacccgaaactgaaaaattcttacgtcaacaagaaaggcaaggaagtgctggttctgtggggcattcaccacccaccgaacagcaaagagcaacagaacctgtaccaaaatgagaacgcttacgtttctgttgtgacttctaactacaatcgtcgctttacccctgaaatcgcggagcgtccaaaagtgcgtgaccaggctggtcgtatgaactactattggaccctgctgaaaccgggcgacaccattatctttgaagcgaacggtaacctgatcgcgcctatgtacgcggcggctctgtctcgtggctaataa

SEQ ID NO: 59 - DNA, 819 bp, Artificial Sequence
  HA1-1 PR8
atgtctcataacggtaaactgtgtcgtctgaaaggtattgcaccactgcagctgggcaaatgcaacatcgcgggttggctgctgggtaaccctgaatgtgacccgctgctgccggttcgttcctggagctacattgttgaaaccccgaactccgaaaacggtatctgctacccgggcgactttattgactatgaagaactgcgtgagcagctgtcttccgtgagcagctttgaacgcttcgaaatcttcccgaaggaaagctcctggccgaaccacaacactaacggcgtgacggcggcttgctcccacgaaggcaaatcttccttttatcgtaacctgctgtggctgactgaaaaggaaggttcctacccaaaactgaaaaacagctatgttaacaaaaagggtaaagaagtcctggtgctgtggggcatccaccacccgccgaactccaaggaacagcagaatctgtatcagaacgaaaacgcatacgtttctgtcgttacttccaactataaccgtcgtttcactccggaaatcgcggaacgtccgaaagtacgcgaccaggctggccgtatgaactactactggaccctgctgaaaccgggtgacactattatcttcgaagctaacggtaacctgatcgcaccaatgtacgctttcgcactgtctcgtggtttcggttccggcattatcaccagcaacgcgtctatgcacgaatgcaacacgaaatgtcagacgccgctgggcgcaattaatagcagcctgccgtaccagaacatccacccggtgactatcggcgaatgcccgaagtatgttcgt

SEQ ID NO: 60 - DNA, 837 bp, Artificial Sequence
  HA1-1.his PR8
atgtctcataacggtaaactgtgtcgtctgaaaggtattgcaccactgcagctgggcaaatgcaacatcgcgggttggctgctgggtaaccctgaatgtgacccgctgctgccggttcgttcctggagctacattgttgaaaccccgaactccgaaaacggtatctgctacccgggcgactttattgactatgaagaactgcgtgagcagctgtcttccgtgagcagctttgaacgcttcgaaatcttcccgaaggaaagctcctggccgaaccacaacactaacggcgtgacggcggcttgctcccacgaaggcaaatcttccttttatcgtaacctgctgtggctgactgaaaaggaaggttcctacccaaaactgaaaaacagctatgttaacaaaaagggtaaagaagtcctggtgctgtggggcatccaccacccgccgaactccaaggaacagcagaatctgtatcagaacgaaaacgcatacgtttctgtcgttacttccaactataaccgtcgtttcactccggaaatcgcggaacgtccgaaagtacgcgaccaggctggccgtatgaactactactggaccctgctgaaaccgggtgacactattatcttcgaagctaacggtaacctgatcgcaccaatgtacgctttcgcactgtctcgtggtttcggttccggcattatcaccagcaacgcgtctatgcacgaatgcaacacgaaatgtcagacgccgctgggcgcaattaatagcagcctgccgtaccagaacatccacccggtgactatcggcgaatgcccgaagtatgttcgtcatcaccatcatcaccat

SEQ ID NO: 61 - DNA, 690 bp, Artificial Sequence
  HA1-2.his PR8
atgaaaggtattgctccactgcaactgggtaaatgcaatattgcgggttggctgctgggcaacccggaatgcgatccgctgctgccggtccgttcctggagctatattgttgaaactccgaactctgagaacggcatctgctatccaggtgatttcattgactatgaggaactgcgtgaacaactgtcttccgtgtcttcctttgaacgtttcgagatttttcctaaagaatcttcttggccgaaccataacactaatggtgttaccgctgcgtgctctcatgaaggtaaatctagcttttaccgcaacctgctgtggctgaccgagaaagaaggttcttacccgaaactgaaaaacagctacgtaaacaaaaagggcaaggaagttctggtcctgtggggtatccaccatccgccgaacagcaaggaacagcagaatctgtatcagaacgaaaacgcatacgtatctgttgttacttctaactacaaccgccgtttcacccctgaaatcgcggaacgtccgaaagtgcgtgaccaggcaggccgcatgaactattactggaccctgctgaagccgggtgatactatcatcttcgaagcgaacggtaacctgatcgccccgatgtacgcgttcgctctgagccgtggcttcggctctggtatcattacgtctcatcaccatcatcaccat

SEQ ID NO: 62 - DNA, 2304 bp, Artificial Sequence
  CRM.HA1-2
atgggtgctgatgatgtcgttgattcctccaaaagcttcgttatggaaaatttctcttcttatcacggcaccaaaccgggttatgtggattctatccaaaaaggcatccagaaaccgaagtccggtacgcagggtaactatgatgacgattggaaaggtttttactccaccgataataaatatgacgcggctggctactctgttgacaacgaaaatccactgtctggtaaggctggcggtgtcgtaaaggtaacgtatcctggcctgaccaaggtgctggcactgaaggtggataacgctgaaaccatcaaaaaggagctgggcctgagcctgactgaaccgctgatggagcaggtcggtaccgaggaattcatcaaacgcttcggtgatggcgcctcccgtgttgtgctgtccctgccgttcgcagaaggctcttcctctgtcgaatatatcaacaactgggaacaggctaaagctctgagcgtcgaactggaaattaactttgagacccgtggcaagcgtggtcaggacgcgatgtacgaatatatggctcaggcttgtgccggtaaccgtgttcgccgttccgtcggttcctctctgtcttgcatcaacctggattgggacgttatccgtgataagaccaaaaccaaaattgaaagcctgaaggaacacggtccgatcaaaaacaaaatgtctgaatctccgaacaaaaccgtgtccgaggaaaaagcgaaacagtatctggaagaattccaccagactgccctggaacatcctgaactgtccgaactgaagactgtaaccggcactaacccggtgttcgcaggcgcaaactacgccgcgtgggcggtaaacgttgcgcaggttattgatagcgaaaccgcagataacctggaaaaaacgaccgcagctctgtctatcctgccgggtatcggttccgttatgggtattgcggacggcgctgtgcaccacaacacggaagaaatcgtcgcacagtctatcgcgctgtcttctctgatggttgctcaggcaattccactggtaggtgaactggtggacattggctttgcggcgtacaacttcgtcgaaagcattatcaacctgttccaggttgtacacaactcttacaaccgtccggcctacagccctggccacaaaacccaaccgtttctgcacgacggttatgcggtgtcctggaacacggttgaagactctatcattcgtaccggctttcagggcgagtccggccacgatatcaaaattactgcagaaaacactccgctgccgatcgctggcgttctgctgccgaccatcccgggtaagctggatgtgaacaaaagcaaaacccacatctctgttaacggtcgtaaaattcgcatgcgctgtcgtgctatcgacggtgatgttaccttctgccgtccgaaatctccagtctacgtgggcaacggtgttcatgccaacctgcacgtggcgttccatcgtagctctagcgaaaaaatccactccaacgaaatctctagcgattctatcggtgttctgggttatcagaaaacggtggatcatacgaaagtcaattctaaactgagcctgttcttcgaaatcaaatctagcggctctggatccggttccaaaggcatcgcgccgctgcagctgggtaaatgtaacattgcgggctggctgctgggtaatccggaatgcgatccgctgctgccggtccgtagctggtcttacattgttgaaactccgaactctgagaatggcatctgctacccgggcgattttatcgactatgaagaactgcgtgaacagctgtcttccgtttcttcctttgaacgtttcgaaatcttcccgaaagaaagcagctggccgaatcacaatacgaacggtgttactgctgcgtgttctcatgaaggtaaatccagcttctaccgtaacctgctgtggctgaccgaaaaagagggttcttatcctaaactgaaaaacagctacgttaacaaaaagggcaaagaagtgctggtgctgtggggtatccatcaccctccgaactctaaagaacaacagaatctgtatcagaacgaaaacgcttacgtttccgtggtgacctctaactataaccgtcgttttaccccggagattgctgaacgtccgaaagtgcgcgatcaggctggccgtatgaactactattggaccctgctgaaaccgggcgataccatcattttcgaagctaacggcaacctgattgctccgatgtatgcgtttgctctgtctcgtggcttcggctctggtattattacgtcttaataa

SEQ ID NO: 63 - DNA, 1068 bp, Artificial Sequence
  LTB.HA1-2
atgaataaggttaagttctacgtactgtttaccgcgctgctgtcttctctgtgcgcgcatggtgctccgcagtctattactgaactgtgctctgaataccacaacacccagatctatactatcaacgataaaatcctgagctataccgaatctatggcaggcaaacgcgaaatggttatcattacctttaaaagcggcgccacctttcaagtggaagttccgggctctcagcatattgactctcaaaaaaaagcgatcgaacgtatgaaagatactctgcgcattacctacctgaccgaaaccaaaatcgataaactgtgcgtatggaacaataagactcctaactctatcgcagctatttctatggaaaactctggtagcggatccggttctaaaggcatcgcgccgctgcagctgggtaaatgtaacattgcgggctggctgctgggtaatccggaatgcgatccgctgctgccggtccgtagctggtcttacattgttgaaactccgaactctgagaatggcatctgctacccgggcgattttatcgactatgaagaactgcgtgaacagctgtcttccgtttcttcctttgaacgtttcgaaatcttcccgaaagaaagcagctggccgaatcacaatacgaacggtgttactgctgcgtgttctcatgaaggtaaatccagcttctaccgtaacctgctgtggctgaccgaaaaagagggttcttatcctaaactgaaaaacagctacgttaacaaaaagggcaaagaagtgctggtgctgtggggtatccatcaccctccgaactctaaagaacaacagaatctgtatcagaacgaaaacgcttacgtttccgtggtgacctctaactataaccgtcgttttaccccggagattgctgaacgtccgaaagtgcgcgatcaggctggccgtatgaactactattggaccctgctgaaaccgggcgataccatcattttcgaagctaacggcaacctgattgctccgatgtatgcgtttgctctgtctcgtggcttcggctctggtattattacgtcttaataa

SEQ ID NO: 64 - DNA, 2346 bp, Artificial Sequence
  STF2.HA1-1 VN
atggcacaagtaatcaacactaacagtctgtcgctgctgacccagaataacctgaacaaatcccagtccgcactgggcaccgctatcgagcgtctgtcttctggtctgcgtatcaacagcgcgaaagacgatgcggcaggtcaggcgattgctaaccgtttcaccgcgaacatcaaaggtctgactcaggcttcccgtaacgctaacgacggtatctccattgcgcagaccactgaaggcgcgctgaacgaaatcaacaacaacctgcagcgtgtgcgtgaactggcggttcagtctgctaacagcaccaactcccagtctgacctcgactccatccaggctgaaatcacccagcgcctgaacgaaatcgaccgtgtatccggccagactcagttcaacggcgtgaaagtcctggcgcaggacaacaccctgaccatccaggttggcgccaacgacggtgaaactatcgatatcgatctgaagcagatcaactctcagaccctgggtctggactcactgaacgtgcagaaagcgtatgatgtgaaagatacagcagtaacaacgaaagcttatgccaataatggtactacactggatgtatcgggtcttgatgatgcagctattaaagcggctacgggtggtacgaatggtacggcttctgtaaccggtggtgcggttaaatttgacgcagataataacaagtactttgttactattggtggctttactggtgctgatgccgccaaaaatggcgattatgaagttaacgttgctactgacggtacagtaacccttgcggctggcgcaactaaaaccacaatgcctgctggtgcgacaactaaaacagaagtacaggagttaaaagatacaccggcagttgtttcagcagatgctaaaaatgccttaattgctggcggcgttgacgctaccgatgctaatggcgctgagttggtcaaaatgtcttataccgataaaaatggtaagacaattgaaggcggttatgcgcttaaagctggcgataagtattacgccgcagattacgatgaagcgacaggagcaattaaagctaaaaccacaagttatactgctgctgacggcactaccaaaacagcggctaaccaactgggtggcgtagacggtaaaaccgaagtcgttactatcgacggtaaaacctacaatgccagcaaagccgctggtcatgatttcaaagcacaaccagagctggcggaagcagccgctaaaaccaccgaaaacccgctgcagaaaattgatgccgcgctggcgcaggtggatgcgctgcgctctgatctgggtgcggtacaaaaccgtttcaactctgctatcaccaacctgggcaataccgtaaacaatctgtctgaagcgcgtagccgtatcgaagattccgactacgcgaccgaagtttccaacatgtctcgcgcgcagattttgcagcaggccggtacttccgttctggcgcaggctaaccaggtcccgcagaacgtgctgagcctgttagcggagaagaaacacaatggcaaactgtgtgatctggatggtgtgaaaccgctgattctgcgcgattgctctgtggcaggctggctgctgggcaaccctatgtgtgacgaattcattaacgttccggaatggtcttacattgttgaaaaagctaaccctgtcaacgatctgtgttaccctggtgactttaacgattacgaagaactgaagcacctgctgtctcgtatcaatcacttcgagaaaatccagatcatcccgaaatcctcctggagctcccacgaagcttctctgggcgtatcctccgcgtgcccgtaccagggcaaatcctctttctttcgtaacgttgtttggctgatcaagaaaaactccacctacccgacgatcaagcgtagctataataacaccaaccaggaagacctgctggttctgtggggcatccaccatccaaacgatgctgcggaacagaccaagctgtaccagaacccgaccacctacatcagcgtgggcacctctacgctgaaccagcgtctggtaccgcgtatcgcaacccgcagcaaggtaaacggtcaaagcggccgcatggaatttttctggaccatcctgaaaccgaacgacgcaatcaacttcgaatctaacggcaatttcatcgctccggagtatgcgtacaaaatcgtaaagaaaggtgatagcactatcatgaaatccgagctggaatatggcaactgtaacaccaaatgccagaccccgatgggtgcaatcaactcctccatgccgtttcacaacattcacccgctgactatcggcgaatgtccgaaatacgttaaatagtaa

SEQ ID NO: 65 - DNA, 46 bp, Artificial Sequence
  FOR PRIMER
agtggctgagcctgttagcggagaagaaacacaatggcaaactgtg

SEQ ID NO: 66 - DNA, 50 bp, Artificial Sequence
  REV PRIMER
agtcgctcagcttactatttaacgtatttcggacattcgccgatagtcag

SEQ ID NO: 67 - DNA, 1605 bp, Artificial Sequence
  HA0s VN
gtgctgagcctgttacgtcagatttgtatcggctaccacgcaaacaactctaccgagcaagttgataccatcatggagaaaaacgtgaccgttactcacgcgcaggacatcctggagaagaaacacaatggcaaactgtgtgatctggatggtgtgaaaccgctgattctgcgcgattgctctgtggcaggctggctgctgggcaaccctatgtgtgacgaattcattaacgttccggaatggtcttacattgttgaaaaagctaaccctgtcaacgatctgtgttaccctggtgactttaacgattacgaagaactgaagcacctgctgtctcgtatcaatcacttcgagaaaatccagatcatcccgaaatcctcctggagctcccacgaagcttctctgggcgtatcctccgcgtgcccgtaccagggcaaatcctctttctttcgtaacgttgtttggctgatcaagaaaaactccacctacccgacgatcaagcgtagctataataacaccaaccaggaagacctgctggttctgtggggcatccaccatccaaacgatgctgcggaacagaccaagctgtaccagaacccgaccacctacatcagcgtgggcacctctacgctgaaccagcgtctggtaccgcgtatcgcaacccgcagcaaggtaaacggtcaaagcggccgcatggaatttttctggaccatcctgaaaccgaacgacgcaatcaacttcgaatctaacggcaatttcatcgctccggagtatgcgtacaaaatcgtaaagaaaggtgatagcactatcatgaaatccgagctggaatatggcaactgtaacaccaaatgccagaccccgatgggtgcaatcaactcctccatgccgtttcacaacattcacccgctgactatcggcgaatgtccgaaatacgttaaatccaatcgtctggttctggctaccggtctgcgtaactccccacagcgtgaacgtcgtcgtaagaaacgtggtctgtttggcgcgatcgctggtttcatcgagggcggctggcagggtatggttgatggctggtacggttatcatcattccaatgaacagggttccggctacgccgcagataaagaaagcactcagaaagcaattgatggcgtaactaacaaagtaaattctatcattgataaaatgaacacccagttcgaggcggttggtcgtgagttcaacaacctggaacgccgtatcgaaaacctgaacaagaaaatggaagacggttttctggatgtgtggacttacaatgctgaactgctggtgctgatggaaaacgagcgtaccctggacttccacgacagcaacgtcaaaaatctgtatgacaaagtccgtctgcagctgcgtgataacgctaaagagctgggtaatggctgcttcgagttctatcacaaatgcgacaacgaatgcatggaatctgtccgcaacggcacttacgattatccgcagtactccgaagaagcgcgcctgaaacgcgaagagatctccggtgtgaagctggagtctattggcatctaccagatcctgtccatctacagcacctagtaagctgagcgcctacgcagc

SEQ ID NO: 68 - DNA, 2193 bp, Artificial Sequence
  STF2.HA1-2 VN
atggcacaagtaatcaacactaacagtctgtcgctgctgacccagaataacctgaacaaatcccagtccgcactgggcaccgctatcgagcgtctgtcttctggtctgcgtatcaacagcgcgaaagacgatgcggcaggtcaggcgattgctaaccgtttcaccgcgaacatcaaaggtctgactcaggcttcccgtaacgctaacgacggtatctccattgcgcagaccactgaaggcgcgctgaacgaaatcaacaacaacctgcagcgtgtgcgtgaactggcggttcagtctgctaacagcaccaactcccagtctgacctcgactccatccaggctgaaatcacccagcgcctgaacgaaatcgaccgtgtatccggccagactcagttcaacggcgtgaaagtcctggcgcaggacaacaccctgaccatccaggttggcgccaacgacggtgaaactatcgatatcgatctgaagcagatcaactctcagaccctgggtctggactcactgaacgtgcagaaagcgtatgatgtgaaagatacagcagtaacaacgaaagcttatgccaataatggtactacactggatgtatcgggtcttgatgatgcagctattaaagcggctacgggtggtacgaatggtacggcttctgtaaccggtggtgcggttaaatttgacgcagataataacaagtactttgttactattggtggctttactggtgctgatgccgccaaaaatggcgattatgaagttaacgttgctactgacggtacagtaacccttgcggctggcgcaactaaaaccacaatgcctgctggtgcgacaactaaaacagaagtacaggagttaaaagatacaccggcagttgtttcagcagatgctaaaaatgccttaattgctggcggcgttgacgctaccgatgctaatggcgctgagttggtcaaaatgtcttataccgataaaaatggtaagacaattgaaggcggttatgcgcttaaagctggcgataagtattacgccgcagattacgatgaagcgacaggagcaattaaagctaaaaccacaagttatactgctgctgacggcactaccaaaacagcggctaaccaactgggtggcgtagacggtaaaaccgaagtcgttactatcgacggtaaaacctacaatgccagcaaagccgctggtcatgatttcaaagcacaaccagagctggcggaagcagccgctaaaaccaccgaaaacccgctgcagaaaattgatgccgcgctggcgcaggtggatgcgctgcgctctgatctgggtgcggtacaaaaccgtttcaactctgctatcaccaacctgggcaataccgtaaacaatctgtctgaagcgcgtagccgtatcgaagattccgactacgcgaccgaagtttccaacatgtctcgcgcgcagattttgcagcaggccggtacttccgttctggcgcaggctaaccaggtcccgcagaacgtgctgagcctgttagcaggtgtgaaaccgctgattctgcgcgattgctctgtggcaggctggctgctgggcaaccctatgtgtgacgaattcattaacgttccggaatggtcttacattgttgaaaaagctaaccctgtcaacgatctgtgttaccctggtgactttaacgattacgaagaactgaagcacctgctgtctcgtatcaatcacttcgagaaaatccagatcatcccgaaatcctcctggagctcccacgaagcttctctgggcgtatcctccgcgtgcccgtaccagggcaaatcctctttctttcgtaacgttgtttggctgatcaagaaaaactccacctacccgacgatcaagcgtagctataataacaccaaccaggaagacctgctggttctgtggggcatccaccatccaaacgatgctgcggaacagaccaagctgtaccagaacccgaccacctacatcagcgtgggcacctctacgctgaaccagcgtctggtaccgcgtatcgcaacccgcagcaaggtaaacggtcaaagcggccgcatggaatttttctggaccatcctgaaaccgaacgacgcaatcaacttcgaatctaacggcaatttcatcgctccggagtatgcgtacaaaatcgtaaagaaaggtgatagcactatcatgaaatccgagtagtaa

SEQ ID NO: 69 - DNA, 49 bp, Artificial Sequence
  FOR PRIMER
agtcgctgagcctgttagcaggtgtgaaaccgctgattctgcgcgattg

SEQ ID NO: 70 - DNA, 48 bp, Artificial Sequence
  REV PRIMER
tgacgctcagcttactactcggatttcatgatagtgctatcacctttc

SEQ ID NO: 71 - DNA, 2193 bp, Artificial Sequence
  STF2.HA1-2mut VN
atggcacaagtaatcaacactaacagtctgtcgctgctgacccagaataacctgaacaaatcccagtccgcactgggcaccgctatcgagcgtctgtcttctggtctgcgtatcaacagcgcgaaagacgatgcggcaggtcaggcgattgctaaccgtttcaccgcgaacatcaaaggtctgactcaggcttcccgtaacgctaacgacggtatctccattgcgcagaccactgaaggcgcgctgaacgaaatcaacaacaacctgcagcgtgtgcgtgaactggcggttcagtctgctaacagcaccaactcccagtctgacctcgactccatccaggctgaaatcacccagcgcctgaacgaaatcgaccgtgtatccggccagactcagttcaacggcgtgaaagtcctggcgcaggacaacaccctgaccatccaggttggcgccaacgacggtgaaactatcgatatcgatctgaagcagatcaactctcagaccctgggtctggactcactgaacgtgcagaaagcgtatgatgtgaaagatacagcagtaacaacgaaagcttatgccaataatggtactacactggatgtatcgggtcttgatgatgcagctattaaagcggctacgggtggtacgaatggtacggcttctgtaaccggtggtgcggttaaatttgacgcagataataacaagtactttgttactattggtggctttactggtgctgatgccgccaaaaatggcgattatgaagttaacgttgctactgacggtacagtaacccttgcggctggcgcaactaaaaccacaatgcctgctggtgcgacaactaaaacagaagtacaggagttaaaagatacaccggcagttgtttcagcagatgctaaaaatgccttaattgctggcggcgttgacgctaccgatgctaatggcgctgagttggtcaaaatgtcttataccgataaaaatggtaagacaattgaaggcggttatgcgcttaaagctggcgataagtattacgccgcagattacgatgaagcgacaggagcaattaaagctaaaaccacaagttatactgctgctgacggcactaccaaaacagcggctaaccaactgggtggcgtagacggtaaaaccgaagtcgttactatcgacggtaaaacctacaatgccagcaaagccgctggtcatgatttcaaagcacaaccagagctggcggaagcagccgctaaaaccaccgaaaacccgctgcagaaaattgatgccgcgctggcgcaggtggatgcgctgcgctctgatctgggtgcggtacaaaaccgtttcaactctgctatcaccaacctgggcaataccgtaaacaatctgtctgaagcgcgtagccgtatcgaagattccgactacgcgaccgaagtttccaacatgtctcgcgcgcagattttgcagcaggccggtacttccgttctggcgcaggctaaccaggtcccgcagaacgtgctgagcctgttagcgggtgcgaaaccgctgtctctgcgcgattgctctgtggcaggctggctgctgggcaaccctatgtgtgacgaattcattaacgttccggaatggtctgatattgccgaaaaagctaaccctgtcaacgatctgtgttaccctggtgactttaacgattacgaagaactgaagcacctgctgtctcgtatcaatcacttcgagaaaatccagatcatcccgaaatcctcctggagctcccacgaagcttctctgggcgtatcctccgcgtgcccgtaccagggcaaatcctctttctttcgtaacgttgtttggctgatcaagaaaaactccacctacccgacgatcaagcgtagctataataacaccaaccaggaagacctgctggttctgtggggcatccaccatccaaacgatgctgcggaacagaccaagctgtaccagaacccgaccacctacatcagcgtgggcacctctacgctgaaccagcgtctggtaccgcgtatcgcaacccgcagcaaggtaaacggtcaaagcggccgcatggaatttttctggaccatcctgaaaccgaacgacgcaatcaacttcgaatctaacggcaatttcatcgctccggagtatgcgtacaaaatcgtaaagaaaggtgatagcactatcatgaaatccgagtagtaa

SEQ ID NO: 72 - DNA, 675 bp, Artificial Sequence
  72 HA1-2mut VN
ggtgcgaaaccgctgtctctgcgcgattgctctgtggcaggctggctgctgggcaaccctatgtgtgacgaattcattaacgttccggaatggtctgatattgccgaaaaagctaaccctgtcaacgatctgtgttaccctggtgactttaacgattacgaagaactgaagcacctgctgtctcgtatcaatcacttcgagaaaatccagatcatcccgaaatcctcctggagctcccacgaagcttctctgggcgtatcctccgcgtgcccgtaccagggcaaatcctctttctttcgtaacgttgtttggctgatcaagaaaaactccacctacccgacgatcaagcgtagctataataacaccaaccaggaagacctgctggttctgtggggcatccaccatccaaacgatgctgcggaacagaccaagctgtaccagaacccgaccacctacatcagcgtgggcacctctacgctgaaccagcgtctggtaccgcgtatcgcaacccgcagcaaggtaaacggtcaaagcggccgcatggaatttttctggaccatcctgaaaccgaacgacgcaatcaacttcgaatctaacggcaatttcatcgctccggagtatgcgtacaaaatcgtaaagaaaggtgatagcactatcatgaaatccgagtagtaa

SEQ ID NO: 73 - DNA, 2346 bp, Artificial Sequence
  STF2.HA1-1 IND
atggcacaagtaatcaacactaacagtctgtcgctgctgacccagaataacctgaacaaatcccagtccgcactgggcaccgctatcgagcgtctgtcttctggtctgcgtatcaacagcgcgaaagacgatgcggcaggtcaggcgattgctaaccgtttcaccgcgaacatcaaaggtctgactcaggcttcccgtaacgctaacgacggtatctccattgcgcagaccactgaaggcgcgctgaacgaaatcaacaacaacctgcagcgtgtgcgtgaactggcggttcagtctgctaacagcaccaactcccagtctgacctcgactccatccaggctgaaatcacccagcgcctgaacgaaatcgaccgtgtatccggccagactcagttcaacggcgtgaaagtcctggcgcaggacaacaccctgaccatccaggttggcgccaacgacggtgaaactatcgatatcgatctgaagcagatcaactctcagaccctgggtctggactcactgaacgtgcagaaagcgtatgatgtgaaagatacagcagtaacaacgaaagcttatgccaataatggtactacactggatgtatcgggtcttgatgatgcagctattaaagcggctacgggtggtacgaatggtacggcttctgtaaccggtggtgcggttaaatttgacgcagataataacaagtactttgttactattggtggctttactggtgctgatgccgccaaaaatggcgattatgaagttaacgttgctactgacggtacagtaacccttgcggctggcgcaactaaaaccacaatgcctgctggtgcgacaactaaaacagaagtacaggagttaaaagatacaccggcagttgtttcagcagatgctaaaaatgccttaattgctggcggcgttgacgctaccgatgctaatggcgctgagttggtcaaaatgtcttataccgataaaaatggtaagacaattgaaggcggttatgcgcttaaagctggcgataagtattacgccgcagattacgatgaagcgacaggagcaattaaagctaaaaccacaagttatactgctgctgacggcactaccaaaacagcggctaaccaactgggtggcgtagacggtaaaaccgaagtcgttactatcgacggtaaaacctacaatgccagcaaagccgctggtcatgatttcaaagcacaaccagagctggcggaagcagccgctaaaaccaccgaaaacccgctgcagaaaattgatgccgcgctggcgcaggtggatgcgctgcgctctgatctgggtgcggtacaaaaccgtttcaactctgctatcaccaacctgggcaataccgtaaacaatctgtctgaagcgcgtagccgtatcgaagattccgactacgcgaccgaagtttccaacatgtctcgcgcgcagattttgcagcaggccggtacttccgttctggcgcaggctaaccaggtcccgcagaacgtgctgtctctgttagcggagaaaacgcataacggtaaactgtgcgacctggacggcgtgaagccgctgatcctgcgtgactgttctgttgctggctggctgctgggcaacccgatgtgcgatgagttcatcaacgttccggagtggtcttatattgttgaaaaagcgaacccgaccaatgacctgtgctacccgggctcttttaatgactacgaggagctgaaacatctgctgtctcgcatcaaccatttcgaaaaaattcagatcatcccgaaatcttcctggagcgatcacgaagcttcttccggcgtatcttctgcatgcccttacctgggttccccgtctttcttccgtaacgtggtttggctgatcaagaagaactctacgtacccgaccatcaagaaatcctataacaacactaaccaggaagatctgctggtgctgtggggtatccatcatccaaacgatgcagccgaacagacccgcctgtaccagaatccgaccacgtacatctctatcggcacttctaccctgaatcaacgcctggtgccgaaaatcgcaactcgcagcaaagtcaacggccaatctggtcgcatggagtttttctggaccatcctgaaaccgaacgacgcgattaacttcgaaagcaacggcaacttcattgcaccggaatatgcttacaagatcgttaaaaagggtgattctgcgatcatgaaaagcgagctggaatacggcaactgcaacactaaatgccagaccccgatgggtgcaatcaattccagcatgccatttcacaacatccacccgctgaccatcggcgagtgtccaaaatacgttaaataatag

SEQ ID NO: 74 - DNA, 46 bp, Artificial Sequence
  FOR PRIMER
agtggctgagcctgttagcggagaaaacgcataacggtaaactgtg

SEQ ID NO: 75 - DNA, 1685 bp, Artificial Sequence
  HA0s IND
gctgagcctgttacgtgatcaaatctgcatcggttaccacgcaaacaactccactgaacaagtggatacgatcatggaaaagaacgtgaccgtgacccacgctcaagatatcctggagaaaacgcataacggtaaactgtgcgacctggacggcgtgaagccgctgatcctgcgtgactgttctgttgctggctggctgctgggcaacccgatgtgcgatgagttcatcaacgttccggagtggtcttatattgttgaaaaagcgaacccgaccaatgacctgtgctacccgggctcttttaatgactacgaggagctgaaacatctgctgtctcgcatcaaccatttcgaaaaaattcagatcatcccgaaatcttcctggagcgatcacgaagcttcttccggcgtatcttctgcatgcccttacctgggttccccgtctttcttccgtaacgtggtttggctgatcaagaagaactctacgtacccgaccatcaagaaatcctataacaacactaaccaggaagatctgctggtgctgtggggtatccatcatccaaacgatgcagccgaacagacccgcctgtaccagaatccgaccacgtacatctctatcggcacttctaccctgaatcaacgcctggtgccgaaaatcgcaactcgcagcaaagtcaacggccaatctggtcgcatggagtttttctggaccatcctgaaaccgaacgacgcgattaacttcgaaagcaacggcaacttcattgcaccggaatatgcttacaagatcgttaaaaagggtgattctgcgatcatgaaaagcgagctggaatacggcaactgcaacactaaatgccagaccccgatgggtgcaatcaattccagcatgccatttcacaacatccacccgctgaccatcggcgagtgtccaaaatacgttaaatccaatcgtctggtgctggcaacgggcctgcgcaactctccgcaacgtgagtctcgtcgcaaaaagcgtggcctgtttggcgcaattgcgggcttcatcgagggcggctggcagggtatggttgatggttggtacggttatcaccattccaacgagcagggctctggttacgctgcggacaaagagtccacgcagaaagcgatcgatggcgtcaccaacaaagtgaactctatcatcgacaagatgaacactcagttcgaggctgtgggccgtgaattcaacaatctggaacgtcgcatcgaaaacctgaacaaaaagatggaagacggtttcctggacgtatggacctataacgcagagctgctggttctgatggaaaacgaacgtactctggacttccacgattctaacgttaaaaacctgtacgacaaagttcgtctgcagctgcgcgataatgcaaaagaactgggtaacggctgctttgaattttaccacaaatgtgacaacgaatgcatggaaagcatccgtaacggtacctacaattacccacagtactccgaagaagcgcgtctgaaacgtgaagaaatctccggtgtaaaactggaatccattggcacgtatcagattctgtctatctactccacggtagcgtcctctctggcgctggcaattatgatggccggcctgtctctgtggatgtgctctaacggctctctgcagtgccgcatctgcatctaataggctgagc

SEQ ID NO: 76 - DNA, 2193 bp, Artificial Sequence
  STF2.HA1-2 IND
atggcacaagtaatcaacactaacagtctgtcgctgctgacccagaataacctgaacaaatcccagtccgcactgggcaccgctatcgagcgtctgtcttctggtctgcgtatcaacagcgcgaaagacgatgcggcaggtcaggcgattgctaaccgtttcaccgcgaacatcaaaggtctgactcaggcttcccgtaacgctaacgacggtatctccattgcgcagaccactgaaggcgcgctgaacgaaatcaacaacaacctgcagcgtgtgcgtgaactggcggttcagtctgctaacagcaccaactcccagtctgacctcgactccatccaggctgaaatcacccagcgcctgaacgaaatcgaccgtgtatccggccagactcagttcaacggcgtgaaagtcctggcgcaggacaacaccctgaccatccaggttggcgccaacgacggtgaaactatcgatatcgatctgaagcagatcaactctcagaccctgggtctggactcactgaacgtgcagaaagcgtatgatgtgaaagatacagcagtaacaacgaaagcttatgccaataatggtactacactggatgtatcgggtcttgatgatgcagctattaaagcggctacgggtggtacgaatggtacggcttctgtaaccggtggtgcggttaaatttgacgcagataataacaagtactttgttactattggtggctttactggtgctgatgccgccaaaaatggcgattatgaagttaacgttgctactgacggtacagtaacccttgcggctggcgcaactaaaaccacaatgcctgctggtgcgacaactaaaacagaagtacaggagttaaaagatacaccggcagttgtttcagcagatgctaaaaatgccttaattgctggcggcgttgacgctaccgatgctaatggcgctgagttggtcaaaatgtcttataccgataaaaatggtaagacaattgaaggcggttatgcgcttaaagctggcgataagtattacgccgcagattacgatgaagcgacaggagcaattaaagctaaaaccacaagttatactgctgctgacggcactaccaaaacagcggctaaccaactgggtggcgtagacggtaaaaccgaagtcgttactatcgacggtaaaacctacaatgccagcaaagccgctggtcatgatttcaaagcacaaccagagctggcggaagcagccgctaaaaccaccgaaaacccgctgcagaaaattgatgccgcgctggcgcaggtggatgcgctgcgctctgatctgggtgcggtacaaaaccgtttcaactctgctatcaccaacctgggcaataccgtaaacaatctgtctgaagcgcgtagccgtatcgaagattccgactacgcgaccgaagtttccaacatgtctcgcgcgcagattttgcagcaggccggtacttccgttctggcgcaggctaaccaggtcccgcagaacgtgctgagcctgttagcaggtgtgaaaccgctgattctgcgcgattgttctgttgctggctggctgctgggcaacccgatgtgcgatgagttcatcaacgttccggagtggtcttatattgttgaaaaagcgaacccgaccaatgacctgtgctacccgggctcttttaatgactacgaggagctgaaacatctgctgtctcgcatcaaccatttcgaaaaaattcagatcatcccgaaatcttcctggagcgatcacgaagcttcttccggcgtatcttctgcatgcccttacctgggttccccgtctttcttccgtaacgtggtttggctgatcaagaagaactctacgtacccgaccatcaagaaatcctataacaacactaaccaggaagatctgctggtgctgtggggtatccatcatccaaacgatgcagccgaacagacccgcctgtaccagaatccgaccacgtacatctctatcggcacttctaccctgaatcaacgcctggtgccgaaaatcgcaactcgcagcaaagtcaacggccaatctggtcgcatggagtttttctggaccatcctgaaaccgaacgacgcgattaacttcgaaagcaacggcaacttcattgcaccggaatatgcttacaagatcgttaaaaagggtgattctgcgatcatgaaaagcgagtaatag

SEQ ID NO: 77 - DNA, 43 bp, Artificial Sequence
  REV PRIMER
agtcgctcagcctattactcgcttttcatgatcgcagaatcac

SEQ ID NO: 78 - DNA, 2193 bp, Artificial Sequence
  STF2.HA1-2mut IND
atggcacaagtaatcaacactaacagtctgtcgctgctgacccagaataacctgaacaaatcccagtccgcactgggcaccgctatcgagcgtctgtcttctggtctgcgtatcaacagcgcgaaagacgatgcggcaggtcaggcgattgctaaccgtttcaccgcgaacatcaaaggtctgactcaggcttcccgtaacgctaacgacggtatctccattgcgcagaccactgaaggcgcgctgaacgaaatcaacaacaacctgcagcgtgtgcgtgaactggcggttcagtctgctaacagcaccaactcccagtctgacctcgactccatccaggctgaaatcacccagcgcctgaacgaaatcgaccgtgtatccggccagactcagttcaacggcgtgaaagtcctggcgcaggacaacaccctgaccatccaggttggcgccaacgacggtgaaactatcgatatcgatctgaagcagatcaactctcagaccctgggtctggactcactgaacgtgcagaaagcgtatgatgtgaaagatacagcagtaacaacgaaagcttatgccaataatggtactacactggatgtatcgggtcttgatgatgcagctattaaagcggctacgggtggtacgaatggtacggcttctgtaaccggtggtgcggttaaatttgacgcagataataacaagtactttgttactattggtggctttactggtgctgatgccgccaaaaatggcgattatgaagttaacgttgctactgacggtacagtaacccttgcggctggcgcaactaaaaccacaatgcctgctggtgcgacaactaaaacagaagtacaggagttaaaagatacaccggcagttgtttcagcagatgctaaaaatgccttaattgctggcggcgttgacgctaccgatgctaatggcgctgagttggtcaaaatgtcttataccgataaaaatggtaagacaattgaaggcggttatgcgcttaaagctggcgataagtattacgccgcagattacgatgaagcgacaggagcaattaaagctaaaaccacaagttatactgctgctgacggcactaccaaaacagcggctaaccaactgggtggcgtagacggtaaaaccgaagtcgttactatcgacggtaaaacctacaatgccagcaaagccgctggtcatgatttcaaagcacaaccagagctggcggaagcagccgctaaaaccaccgaaaacccgctgcagaaaattgatgccgcgctggcgcaggtggatgcgctgcgctctgatctgggtgcggtacaaaaccgtttcaactctgctatcaccaacctgggcaataccgtaaacaatctgtctgaagcgcgtagccgtatcgaagattccgactacgcgaccgaagtttccaacatgtctcgcgcgcagattttgcagcaggccggtacttccgttctggcgcaggctaaccaggtcccgcagaacgtgctgtctctgttagcgggcgcaaagccgctgtctctgcgtgactgttctgttgctggctggctgctgggcaacccgatgtgcgatgagttcatcaacgttccggagtggtctgatattgcggaaaaagcgaacccgaccaatgacctgtgctacccgggctcttttaatgactacgaggagctgaaacatctgctgtctcgcatcaaccatttcgaaaaaattcagatcatcccgaaatcttcctggagcgatcacgaagcttcttccggcgtatcttctgcatgcccttacctgggttccccgtctttcttccgtaacgtggtttggctgatcaagaagaactctacgtacccgaccatcaagaaatcctataacaacactaaccaggaagatctgctggtgctgtggggtatccatcatccaaacgatgcagccgaacagacccgcctgtaccagaatccgaccacgtacatctctatcggcacttctaccctgaatcaacgcctggtgccgaaaatcgcaactcgcagcaaagtcaacggccaatctggtcgcatggagtttttctggaccatcctgaaaccgaacgacgcgattaacttcgaaagcaacggcaacttcattgcaccggaatatgcttacaagatcgttaaaaagggtgattctgcgatcatgaaaagcgagtaatag

SEQ ID NO: 79 - DNA, 682 bp, Artificial Sequence
  HA1-2mut IND
ggcgcaaagccgctgtctctgcgtgactgttctgttgctggctggctgctgggcaacccgatgtgcgatgagttcatcaacgttccggagtggtctgatattgcggaaaaagcgaacccgaccaatgacctgtgctacccgggctcttttaatgactacgaggagctgaaacatctgctgtctcgcatcaaccatttcgaaaaaattcagatcatcccgaaatcttcctggagcgatcacgaagcttcttccggcgtatcttctgcatgcccttacctgggttccccgtctttcttccgtaacgtggtttggctgatcaagaagaactctacgtacccgaccatcaagaaatcctataacaacactaaccaggaagatctgctggtgctgtggggtatccatcatccaaacgatgcagccgaacagacccgcctgtaccagaatccgaccacgtacatctctatcggcacttctaccctgaatcaacgcctggtgccgaaaatcgcaactcgcagcaaagtcaacggccaatctggtcgcatggagtttttctggaccatcctgaaaccgaacgacgcgattaacttcgaaagcaacggcaacttcattgcaccggaatatgcttacaagatcgttaaaaagggtgattctgcgatcatgaaaagcgagtaataggctgagc

SEQ ID NO: 80 - DNA, 2340 bp, Artificial Sequence
  STF2.HA1-1 NC
atggcacaagtaatcaacactaacagtctgtcgctgctgacccagaataacctgaacaaatcccagtccgcactgggcaccgctatcgagcgtctgtcttctggtctgcgtatcaacagcgcgaaagacgatgcggcaggtcaggcgattgctaaccgtttcaccgcgaacatcaaaggtctgactcaggcttcccgtaacgctaacgacggtatctccattgcgcagaccactgaaggcgcgctgaacgaaatcaacaacaacctgcagcgtgtgcgtgaactggcggttcagtctgctaacagcaccaactcccagtctgacctcgactccatccaggctgaaatcacccagcgcctgaacgaaatcgaccgtgtatccggccagactcagttcaacggcgtgaaagtcctggcgcaggacaacaccctgaccatccaggttggcgccaacgacggtgaaactatcgatatcgatctgaagcagatcaactctcagaccctgggtctggactcactgaacgtgcagaaagcgtatgatgtgaaagatacagcagtaacaacgaaagcttatgccaataatggtactacactggatgtatcgggtcttgatgatgcagctattaaagcggctacgggtggtacgaatggtacggcttctgtaaccggtggtgcggttaaatttgacgcagataataacaagtactttgttactattggtggctttactggtgctgatgccgccaaaaatggcgattatgaagttaacgttgctactgacggtacagtaacccttgcggctggcgcaactaaaaccacaatgcctgctggtgcgacaactaaaacagaagtacaggagttaaaagatacaccggcagttgtttcagcagatgctaaaaatgccttaattgctggcggcgttgacgctaccgatgctaatggcgctgagttggtcaaaatgtcttataccgataaaaatggtaagacaattgaaggcggttatgcgcttaaagctggcgataagtattacgccgcagattacgatgaagcgacaggagcaattaaagctaaaaccacaagttatactgctgctgacggcactaccaaaacagcggctaaccaactgggtggcgtagacggtaaaaccgaagtcgttactatcgacggtaaaacctacaatgccagcaaagccgctggtcatgatttcaaagcacaaccagagctggcggaagcagccgctaaaaccaccgaaaacccgctgcagaaaattgatgccgcgctggcgcaggtggatgcgctgcgctctgatctgggtgcggtacaaaaccgtttcaactctgctatcaccaacctgggcaataccgtaaacaatctgtctgaagcgcgtagccgtatcgaagattccgactacgcgaccgaagtttccaacatgtctcgcgcgcagattttgcagcaggccggtacttccgttctggcgcaggctaaccaggtcccgcagaacgtgctgagcctgttagcgtcccacaacggtaaactgtgtctgctgaaaggcatcgcaccgctgcagctgggtaactgtagcgttgcaggttggatcctgggtaacccggagtgcgaactgctgatttccaaggagagctggtcttacattgtcgaaacgccgaatccggaaaacggcacttgttatccgggttacttcgccgattacgaagaactgcgtgaacaactgtcttccgtgagctctttcgaacgtttcgagatcttcccgaaagagagcagctggccaaaccacactgttaccggtgtgtctgcgagctgttctcacaacggcaagtcttctttctaccgcaacctgctgtggctgacgggtaagaatggcctgtatccgaacctgtctaaatcttacgtaaacaacaaagagaaagaggtgctggtcctgtggggcgtacaccatccaccaaatatcggcaaccagcgcgccctgtaccacaccgaaaacgcttatgtgtccgtggtgagctcccattacagccgtcgttttactccggagattgccaaacgtccgaaagttcgtgatcaggaaggccgtattaactactactggactctgctggagccgggcgataccatcattttcgaggcaaacggcaacctgattgcgccatggtacgcgttcgccctgagccgtggttttggctccggtattatcacctctaacgcgccaatggacgaatgcgacgcgaaatgccaaacgccgcagggcgcaatcaacagcagcctgccgttccagaacgttcacccggttaccatcggcgaatgccctaaatacgtgcgctaatag

SEQ ID NO: 81 - DNA, 84 bp, Artificial Sequence
  FOR PRIMER
aaccaggtcccgcagaacgtgctgagcctgttagcgtcccacaacggtaaactgtgtctgctgaaaggcatcgcaccgctgcag

SEQ ID NO: 82 - DNA, 78 bp, Artificial Sequence
  REV PRIMER
gaacagctcagttcctacgagctcagcctattagcgcacgtatttagggcattcgccgatggtaaccgggtgaacgtt

SEQ ID NO: 83 - DNA, 1653 bp, Artificial Sequence
  HA0s NC
gacacgatctgtattggttatcatgcaaacaactctactgacactgtagatactgtgctggaaaagaacgtaaccgttacccacagcgttaacctgctggaagattcccacaacggtaaactgtgtctgctgaaaggcatcgcaccgctgcagctgggtaactgtagcgttgcaggttggatcctgggtaacccggagtgcgaactgctgatttccaaggagagctggtcttacattgtcgaaacgccgaatccggaaaacggcacttgttatccgggttacttcgccgattacgaagaactgcgtgaacaactgtcttccgtgagctctttcgaacgtttcgagatcttcccgaaagagagcagctggccaaaccacactgttaccggtgtgtctgcgagctgttctcacaacggcaagtcttctttctaccgcaacctgctgtggctgacgggtaagaatggcctgtatccgaacctgtctaaatcttacgtaaacaacaaagagaaagaggtgctggtcctgtggggcgtacaccatccaccaaatatcggcaaccagcgcgccctgtaccacaccgaaaacgcttatgtgtccgtggtgagctcccattacagccgtcgttttactccggagattgccaaacgtccgaaagttcgtgatcaggaaggccgtattaactactactggactctgctggagccgggcgataccatcattttcgaggcaaacggcaacctgattgcgccatggtacgcgttcgccctgagccgtggttttggctccggtattatcacctctaacgcgccaatggacgaatgcgacgcgaaatgccaaacgccgcagggcgcaatcaacagcagcctgccgttccagaacgttcacccggttaccatcggcgaatgccctaaatacgtgcgctccgccaaactgcgcatggttactggtctgcgtaacatcccgagcattcagtctcgcggtctgttcggtgcgatcgcgggcttcattgaaggcggttggaccggtatggtggatggttggtacggctaccatcaccagaacgaacagggtagcggttacgctgccgaccagaaatccacccagaacgctattaacggtatcaccaacaaagttaacagcgtaattgagaagatgaacacgcagttcaccgccgtaggtaaggaattcaacaagctggaacgtcgcatggaaaacctgaacaaaaaggtggacgacggctttctggacatctggacctacaacgctgaactgctggtgctgctggaaaacgaacgtaccctggatttccacgactctaatgttaaaaacctgtacgaaaaggtcaagtctcaactgaaaaacaatgcgaaggaaatcggcaacggctgtttcgaattctaccataaatgcaacaacgaatgcatggaatccgttaaaaacggtacctatgactaccctaaatactccgaagaaagcaaactgaaccgcgagaaaatcgatggtgtaaaactggaatctatgggtgtttaccagatcctggcgatctactccacggtagccagcagcctggttctgctggttagcctgggtgcaattagcttctggatgtgctctaacggcagcctgcaatgccgcatctgtaataggctgagc

SEQ ID NO: 84 - DNA, 2193 bp, Artificial Sequence
  STF2HA1-2 NC
atggcacaagtaatcaacactaacagtctgtcgctgctgacccagaataacctgaacaaatcccagtccgcactgggcaccgctatcgagcgtctgtcttctggtctgcgtatcaacagcgcgaaagacgatgcggcaggtcaggcgattgctaaccgtttcaccgcgaacatcaaaggtctgactcaggcttcccgtaacgctaacgacggtatctccattgcgcagaccactgaaggcgcgctgaacgaaatcaacaacaacctgcagcgtgtgcgtgaactggcggttcagtctgctaacagcaccaactcccagtctgacctcgactccatccaggctgaaatcacccagcgcctgaacgaaatcgaccgtgtatccggccagactcagttcaacggcgtgaaagtcctggcgcaggacaacaccctgaccatccaggttggcgccaacgacggtgaaactatcgatatcgatctgaagcagatcaactctcagaccctgggtctggactcactgaacgtgcagaaagcgtatgatgtgaaagatacagcagtaacaacgaaagcttatgccaataatggtactacactggatgtatcgggtcttgatgatgcagctattaaagcggctacgggtggtacgaatggtacggcttctgtaaccggtggtgcggttaaatttgacgcagataataacaagtactttgttactattggtggctttactggtgctgatgccgccaaaaatggcgattatgaagttaacgttgctactgacggtacagtaacccttgcggctggcgcaactaaaaccacaatgcctgctggtgcgacaactaaaacagaagtacaggagttaaaagatacaccggcagttgtttcagcagatgctaaaaatgccttaattgctggcggcgttgacgctaccgatgctaatggcgctgagttggtcaaaatgtcttataccgataaaaatggtaagacaattgaaggcggttatgcgcttaaagctggcgataagtattacgccgcagattacgatgaagcgacaggagcaattaaagctaaaaccacaagttatactgctgctgacggcactaccaaaacagcggctaaccaactgggtggcgtagacggtaaaaccgaagtcgttactatcgacggtaaaacctacaatgccagcaaagccgctggtcatgatttcaaagcacaaccagagctggcggaagcagccgctaaaaccaccgaaaacccgctgcagaaaattgatgccgcgctggcgcaggtggatgcgctgcgctctgatctgggtgcggtacaaaaccgtttcaactctgctatcaccaacctgggcaataccgtaaacaatctgtctgaagcgcgtagccgtatcgaagattccgactacgcgaccgaagtttccaacatgtctcgcgcgcagattttgcagcaggccggtacttccgttctggcgcaggctaaccaggtcccgcagaacgtgctgagcctgttagcgaaaggcatcgcaccgctgcagctgggtaactgtagcgttgcaggttggatcctgggtaacccggagtgcgaactgctgatttccaaggagagctggtcttacattgtcgaaacgccgaatccggaaaacggcacttgttatccgggttacttcgccgattacgaagaactgcgtgaacaactgtcttccgtgagctctttcgaacgtttcgagatcttcccgaaagagagcagctggccaaaccacactgttaccggtgtgtctgcgagctgttctcacaacggcaagtcttctttctaccgcaacctgctgtggctgacgggtaagaatggcctgtatccgaacctgtctaaatcttacgtaaacaacaaagagaaagaggtgctggtcctgtggggcgtacaccatccaccaaatatcggcaaccagcgcgccctgtaccacaccgaaaacgcttatgtgtccgtggtgagctcccattacagccgtcgttttactccggagattgccaaacgtccgaaagttcgtgatcaggaaggccgtattaactactactggactctgctggagccgggcgataccatcattttcgaggcaaacggcaacctgattgcgccatggtacgcgttcgccctgagccgtggttttggctccggtattatcacctcttaataa

SEQ ID NO: 85 - DNA, 84 bp, Artificial Sequence
  FOR PRIMER
aaccaggtcccgcagaacgtgctgagcctgttagcgaaaggcatcgcaccgctgcagctgggtaactgtagcgttgcaggttgg

SEQ ID NO: 86 - DNA, 84 bp, Artificial Sequence
  REV PRIMER
gaacagctcagttcctacgagctcagcctattaagaggtgataataccggagccaaaaccacggctcagggcgaacgcgtacca

SEQ ID NO: 87 - DNA, 2193 bp, Artificial Sequence
  STF2.HA1-2mut NC
atggcacaagtaatcaacactaacagtctgtcgctgctgacccagaataacctgaacaaatcccagtccgcactgggcaccgctatcgagcgtctgtcttctggtctgcgtatcaacagcgcgaaagacgatgcggcaggtcaggcgattgctaaccgtttcaccgcgaacatcaaaggtctgactcaggcttcccgtaacgctaacgacggtatctccattgcgcagaccactgaaggcgcgctgaacgaaatcaacaacaacctgcagcgtgtgcgtgaactggcggttcagtctgctaacagcaccaactcccagtctgacctcgactccatccaggctgaaatcacccagcgcctgaacgaaatcgaccgtgtatccggccagactcagttcaacggcgtgaaagtcctggcgcaggacaacaccctgaccatccaggttggcgccaacgacggtgaaactatcgatatcgatctgaagcagatcaactctcagaccctgggtctggactcactgaacgtgcagaaagcgtatgatgtgaaagatacagcagtaacaacgaaagcttatgccaataatggtactacactggatgtatcgggtcttgatgatgcagctattaaagcggctacgggtggtacgaatggtacggcttctgtaaccggtggtgcggttaaatttgacgcagataataacaagtactttgttactattggtggctttactggtgctgatgccgccaaaaatggcgattatgaagttaacgttgctactgacggtacagtaacccttgcggctggcgcaactaaaaccacaatgcctgctggtgcgacaactaaaacagaagtacaggagttaaaagatacaccggcagttgtttcagcagatgctaaaaatgccttaattgctggcggcgttgacgctaccgatgctaatggcgctgagttggtcaaaatgtcttataccgataaaaatggtaagacaattgaaggcggttatgcgcttaaagctggcgataagtattacgccgcagattacgatgaagcgacaggagcaattaaagctaaaaccacaagttatactgctgctgacggcactaccaaaacagcggctaaccaactgggtggcgtagacggtaaaaccgaagtcgttactatcgacggtaaaacctacaatgccagcaaagccgctggtcatgatttcaaagcacaaccagagctggcggaagcagccgctaaaaccaccgaaaacccgctgcagaaaattgatgccgcgctggcgcaggtggatgcgctgcgctctgatctgggtgcggtacaaaaccgtttcaactctgctatcaccaacctgggcaataccgtaaacaatctgtctgaagcgcgtagccgtatcgaagattccgactacgcgaccgaagtttccaacatgtctcgcgcgcagattttgcagcaggccggtacttccgttctggcgcaggctaaccaggtcccgcagaacgtgctgagcctgttagcgaaaggcgcggcaccgctgcagctgggtaactgtagcgttgcaggttggatcctgggtaacccggagtgcgaactgctgatttccaaggagagctggtctgatattgcagaaacgccgaatccggaaaacggcacttgttatccgggttacttcgccgattacgaagaactgcgtgaacaactgtcttccgtgagctctttcgaacgtttcgagatcttcccgaaagagagcagctggccaaaccacactgttaccggtgtgtctgcgagctgttctcacaacggcaagtcttctttctaccgcaacctgctgtggctgacgggtaagaatggcctgtatccgaacctgtctaaatcttacgtaaacaacaaagagaaagaggtgctggtcctgtggggcgtacaccatccaccaaatatcggcaaccagcgcgccctgtaccacaccgaaaacgcttatgtgtccgtggtgagctcccattacagccgtcgttttactccggagattgccaaacgtccgaaagttcgtgatcaggaaggccgtattaactactactggactctgctggagccgggcgataccatcattttcgaggcaaacggcaacctgattgcgccatggtacgcgttcgccctgagccgtggttttggctccggtattatcacctcttaatag

SEQ ID NO: 88 - DNA, 698 bp, Artificial Sequence
  HA1-2mut NC
gctgagcctgttagcgaaaggcgcggcaccgctgcagctgggtaactgtagcgttgcaggttggatcctgggtaacccggagtgcgaactgctgatttccaaggagagctggtctgatattgcagaaacgccgaatccggaaaacggcacttgttatccgggttacttcgccgattacgaagaactgcgtgaacaactgtcttccgtgagctctttcgaacgtttcgagatcttcccgaaagagagcagctggccaaaccacactgttaccggtgtgtctgcgagctgttctcacaacggcaagtcttctttctaccgcaacctgctgtggctgacgggtaagaatggcctgtatccgaacctgtctaaatcttacgtaaacaacaaagagaaagaggtgctggtcctgtggggcgtacaccatccaccaaatatcggcaaccagcgcgccctgtaccacaccgaaaacgcttatgtgtccgtggtgagctcccattacagccgtcgttttactccggagattgccaaacgtccgaaagttcgtgatcaggaaggccgtattaactactactggactctgctggagccgggcgataccatcattttcgaggcaaacggcaacctgattgcgccatggtacgcgttcgccctgagccgtggttttggctccggtattatcacctcttaataggctgagc

SEQ ID NO: 89 - protein, 784 aa, Artificial Sequence
  STF2.HA1-1his (PR8)
MAQVINTNSLSLLTQNNLNKSQSALGTAIERLSSGLRINSAKDDAAGQAIANRFTANIKGLTQASRNANDGISIAQTTEGALNEINNNLQRVRELAVQSANSTNSQSDLDSIQAEITQRLNEIDRVSGQTQFNGVKVLAQDNTLTIQVGANDGETIDIDLKQINSQTLGLDSLNVQKAYDVKDTAVTTKAYANNGTTLDVSGLDDAAIKAATGGTNGTASVTGGAVKFDADNNKYFVTIGGFTGADAAKNGDYEVNVATDGTVTLAAGATKTTMPAGATTKTEVQELKDTPAVVSADAKNALIAGGVDATDANGAELVKMSYTDKNGKTIEGGYALKAGDKYYAADYDEATGAIKAKTTSYTAADGTTKTAANQLGGVDGKTEVVTIDGKTYNASKAAGHDFKAQPELAEAAAKTTENPLQKIDAALAQVDALRSDLGAVQNRFNSAITNLGNTVNNLSEARSRIEDSDYATEVSNMSRAQILQQAGTSVLAQANQVPQNVLSLLASHNGKLCRLKGIAPLQLGKCNIAGWLLGNPECDPLLPVRSWSYIVETPNSENGICYPGDFIDYEELREQLSSVSSFERFEIFPKESSWPNHNTNGVTAACSHEGKSSFYRNLLWLTEKEGSYPKLKNSYVNKKGKEVLVLWGIHHPPNSKEQQNLYQNENAYVSVVTSNYNRRFTPEIAERPKVRDQAGRMNYYWTLLKPGDTIIFEANGNLIAPMYAFALSRGFGSGIITSNASMHECNTKCQTPLGAINSSLPYQNIHPVTIGECPKYVRHHHHHH

SEQ ID NO: 90 - protein, 729 aa, Artificial Sequence
  STF2.HA1-2 (PR8)
MAQVINTNSLSLLTQNNLNKSQSALGTAIERLSSGLRINSAKDDAAGQAIANRFTANIKGLTQASRNANDGISIAQTTEGALNEINNNLQRVRELAVQSANSTNSQSDLDSIQAEITQRLNEIDRVSGQTQFNGVKVLAQDNTLTIQVGANDGETIDIDLKQINSQTLGLDSLNVQKAYDVKDTAVTTKAYANNGTTLDVSGLDDAAIKAATGGTNGTASVTGGAVKFDADNNKYFVTIGGFTGADAAKNGDYEVNVATDGTVTLAAGATKTTMPAGATTKTEVQELKDTPAVVSADAKNALIAGGVDATDANGAELVKMSYTDKNGKTIEGGYALKAGDKYYAADYDEATGAIKAKTTSYTAADGTTKTAANQLGGVDGKTEVVTIDGKTYNASKAAGHDFKAQPELAEAAAKTTENPLQKIDAALAQVDALRSDLGAVQNRFNSAITNLGNTVNNLSEARSRIEDSDYATEVSNMSRAQILQQAGTSVLAQANQVPQNVLSLLAKGIAPLQLGKCNIAGWLLGNPECDPLLPVRSWSYIVETPNSENGICYPGDFIDYEELREQLSSVSSFERFEIFPKESSWPNHNTNGVTAACSHEGKSSFYRNLLWLTEKEGSYPKLKNSYVNKKGKEVLVLWGIHHPPNSKEQQNLYQNENAYVSVVTSNYNRRFTPEIAERPKVRDQAGRMNYYWTLLKPGDTIIFEANGNLIAPMYAFALSRGFGSGIITS

SEQ ID NO: 91 - protein, 729 aa, Artificial Sequence
  STF2.HA1-2mut (PR8)
MAQVINTNSLSLLTQNNLNKSQSALGTAIERLSSGLRINSAKDDAAGQAIANRFTANIKGLTQASRNANDGISIAQTTEGALNEINNNLQRVRELAVQSANSTNSQSDLDSIQAEITQRLNEIDRVSGQTQFNGVKVLAQDNTLTIQVGANDGETIDIDLKQINSQTLGLDSLNVQKAYDVKDTAVTTKAYANNGTTLDVSGLDDAAIKAATGGTNGTASVTGGAVKFDADNNKYFVTIGGFTGADAAKNGDYEVNVATDGTVTLAAGATKTTMPAGATTKTEVQELKDTPAVVSADAKNALIAGGVDATDANGAELVKMSYTDKNGKTIEGGYALKAGDKYYAADYDEATGAIKAKTTSYTAADGTTKTAANQLGGVDGKTEVVTIDGKTYNASKAAGHDFKAQPELAEAAAKTTENPLQKIDAALAQVDALRSDLGAVQNRFNSAITNLGNTVNNLSEARSRIEDSDYATEVSNMSRAQILQQAGTSVLAQANQVPQNVLSLLAKGAAPLQLGKCNIAGWLLGNPECDPLLPVRSWSDIAETPNSENGICYPGDFIDYEELREQLSSVSSFERFEIFPKESSWPNHNTNGVTAACSHEGKSSFYRNLLWLTEKEGSYPKLKNSYVNKKGKEVLVLWGIHHPPNSKEQQNLYQNENAYVSVVTSNYNRRFTPEIAERPKVRDQAGRMNYYWTLLKPGDTIIFEANGNLIAPMYAFALSRGFGSGIITS

SEQ ID NO: 92 - protein, 682 aa, Artificial Sequence
  STF2.HA1-3 (PR8)
MAQVINTNSLSLLTQNNLNKSQSALGTAIERLSSGLRINSAKDDAAGQAIANRFTANIKGLTQASRNANDGISIAQTTEGALNEINNNLQRVRELAVQSANSTNSQSDLDSIQAEITQRLNEIDRVSGQTQFNGVKVLAQDNTLTIQVGANDGETIDIDLKQINSQTLGLDSLNVQKAYDVKDTAVTTKAYANNGTTLDVSGLDDAAIKAATGGTNGTASVTGGAVKFDADNNKYFVTIGGFTGADAAKNGDYEVNVATDGTVTLAAGATKTTMPAGATTKTEVQELKDTPAVVSADAKNALIAGGVDATDANGAELVKMSYTDKNGKTIEGGYALKAGDKYYAADYDEATGAIKAKTTSYTAADGTTKTAANQLGGVDGKTEVVTIDGKTYNASKAAGHDFKAQPELAEAAAKTTENPLQKIDAALAQVDALRSDLGAVQNRFNSAITNLGNTVNNLSEARSRIEDSDYATEVSNMSRAQILQQAGTSVLAQANQVPQNVLSLLANSENGICYPGDFIDYEELREQLSSVSSFERFEIFPKESSWPNHNTNGVTAACSHEGKSSFYRNLLWLTEKEGSYPKLKNSYVNKKGKEVLVLWGIHHPPNSKEQQNLYQNENAYVSVVTSNYNRRFTPEIAERPKVRDQAGRMNYYWTLLKPGDTIIFEANGNLIAPMYAFALSRG

SEQ ID NO: 93 - protein, 229 aa, Artificial Sequence
  HA1-2his (PR8)
KGIAPLQLGKCNIAGWLLGNPECDPLLPVRSWSYIVETPNSENGICYPGDFIDYEELREQLSSVSSFERFEIFPKESSWPNHNTNGVTAACSHEGKSSFYRNLLWLTEKEGSYPKLKNSYVNKKGKEVLVLWGIHHPPNSKEQQNLYQNENAYVSVVTSNYNRRFTPEIAERPKVRDQAGRMNYYWTLLKPGDTIIFEANGNLIAPMYAFALSRGFGSGIITSHHHHHH

SEQ ID NO: 94 - protein, 611 aa, Artificial Sequence
  STF2.4xM2e
MAQVINTNSLSLLTQNNLNKSQSALGTAIERLSSGLRINSAKDDAAGQAIANRFTANIKGLTQASRNANDGISIAQTTEGALNEINNNLQRVRELAVQSANSTNSQSDLDSIQAEITQRLNEIDRVSGQTQFNGVKVLAQDNTLTIQVGANDGETIDIDLKQINSQTLGLDSLNVQKAYDVKDTAVTTKAYANNGTTLDVSGLDDAAIKAATGGTNGTASVTGGAVKFDADNNKYFVTIGGFTGADAAKNGDYEVNVATDGTVTLAAGATKTTMPAGATTKTEVQELKDTPAVVSADAKNALIAGGVDATDANGAELVKMSYTDKNGKTIEGGYALKAGDKYYAADYDEATGAIKAKTTSYTAADGTTKTAANQLGGVDGKTEVVTIDGKTYNASKAAGHDFKAQPELAEAAAKTTENPLQKIDAALAQVDALRSDLGAVQNRFNSAITNLGNTVNNLSEARSRIEDSDYATEVSNMSRAQILQQAGTSVLAQANQVPQNVLSLLRLSLLTEVETPIRNEWGSRSNDSSDPLESLLTEVETPIRNEWGSRSNDSSDPGSSLLTEVETPIRNEWGSRSNDSSDPELSLLTEVETPIRNEWGSRSNDSSDPSR

SEQ ID NO: 95 - protein, 729 aa, Artificial Sequence
  STF2.HA1-2 (VN)
MAQVINTNSLSLLTQNNLNKSQSALGTAIERLSSGLRINSAKDDAAGQAIANRFTANIKGLTQASRNANDGISIAQTTEGALNEINNNLQRVRELAVQSANSTNSQSDLDSIQAEITQRLNEIDRVSGQTQFNGVKVLAQDNTLTIQVGANDGETIDIDLKQINSQTLGLDSLNVQKAYDVKDTAVTTKAYANNGTTLDVSGLDDAAIKAATGGTNGTASVTGGAVKFDADNNKYFVTIGGFTGADAAKNGDYEVNVATDGTVTLAAGATKTTMPAGATTKTEVQELKDTPAVVSADAKNALIAGGVDATDANGAELVKMSYTDKNGKTIEGGYALKAGDKYYAADYDEATGAIKAKTTSYTAADGTTKTAANQLGGVDGKTEVVTIDGKTYNASKAAGHDFKAQPELAEAAAKTTENPLQKIDAALAQVDALRSDLGAVQNRFNSAITNLGNTVNNLSEARSRIEDSDYATEVSNMSRAQILQQAGTSVLAQANQVPQNVLSLLAGVKPLILRDCSVAGWLLGNPMCDEFINVPEWSYIVEKANPVNDLCYPGDFNDYEELKHLLSRINHFEKIQIIPKSSWSSHEASLGVSSACPYQGKSSFFRNVVWLIKKNSTYPTIKRSYNNTNQEDLLVLWGIHHPNDAAEQTKLYQNPTTYISVGTSTLNQRLVPRIATRSKVNGQSGRMEFFWTILKPNDAINFESNGNFIAPEYAYKIVKKGDSTIMKSE

SEQ ID NO: 96 - protein, 506 aa, Artificial Sequence
  STF2
MAQVINTNSLSLLTQNNLNKSQSALGTAIERLSSGLRINSAKDDAAGQAIANRFTANIKGLTQASRNANDGISIAQTTEGALNEINNNLQRVRELAVQSANSTNSQSDLDSIQAEITQRLNEIDRVSGQTQFNGVKVLAQDNTLTIQVGANDGETIDIDLKQINSQTLGLDSLNVQKAYDVKDTAVTTKAYANNGTTLDVSGLDDAAIKAATGGTNGTASVTGGAVKFDADNNKYFVTIGGFTGADAAKNGDYEVNVATDGTVTLAAGATKTTMPAGATTKTEVQELKDTPAVVSADAKNALIAGGVDATDANGAELVKMSYTDKNGKTIEGGYALKAGDKYYAADYDEATGAIKAKTTSYTAADGTTKTAANQLGGVDGKTEVVTIDGKTYNASKAAGHDFKAQPELAEAAAKTTENPLQKIDAALAQVDALRSDLGAVQNRFNSAITNLGNTVNNLSEARSRIEDSDYATEVSNMSRAQILQQAGTSVLAQANQVPQNVLSLLA

SEQ ID NO: 97 - DNA, 1614 bp, Artificial Sequence
  STF2.B1p.wt
atgaaattcttagtcaacgttgcccttgtttttatggtcgtatacatttcttacatctatgcggcccaggttatcaataccaactccctgtcgttgctcacccaaaataaccttaataaaagccagagcgcactgggaaccgccatagaacgcctctcaagcggcctccggatcaattctgcaaaagacgacgccgccggtcaggccatcgcaaaccgctttaccgccaatatcaagggactgacgcaggcttcgaggaatgctaacgatggaataagcatcgctcaaaccacggagggcgccctgaacgagatcaacaacaacctacagcgcgtcagggagctcgcagtgcagtccgccaattcgaccaactcgcagtcggacctggactcgatccaagccgaaatcacccagcgcctgaatgagattgaccgggtgagcggtcagacacagtttaacggcgtgaaggtacttgcacaggataacacacttacgatacaggtgggcgccaacgatggtgaaaccatagacattgatctcaaacagattaacagccagacgctcgggttggatagcctgaatgtgcaaaaggcgtacgacgtgaaagacacggcggtcactaccaaagcctacgctaacaatggcactaccttggatgtgagcggattggatgatgcagcaatcaaggctgctaccggcggtacgaacggaaccgcgtccgtgaccggcggtgccgtgaagttcgatgctgacaacaataagtatttcgtcaccattggaggctttactggcgccgacgcagcaaagaacggcgactatgaagtgaacgtggcaaccgatggaaccgtgacgctggccgctggtgccaccaagaccaccatgccagccggcgccacaactaagaccgaggtgcaggagttaaaggacacccccgcggtggttagcgcagatgccaaaaacgcgttgatcgccggcggagtggatgcaactgatgctaatggtgcggagctggttaaaatgtcgtatacagacaagaatggtaagacgatcgagggcggttatgcccttaaggcaggagataagtattacgctgctgattacgatgaggcgacgggagctattaaggccaagacaacgtcatacacggcggcggacggaacgactaagacggctgccaatcagttgggaggggttgacgggaagacagaggtcgttacgatcgatggcaagacatacaacgcctccaaggccgctggccacgatttcaaagctcaacccgaactggccgaggccgcggcgaaaacaactgagaacccgttgcagaagattgatgcggccctggcgcaagtagatgccctgcgctcagacctgggcgccgttcaaaatcgattcaattccgcgattacaaacctgggcaatacagtaaacaatctatccgaggccagatcccgcattgaagactccgactacgcgacagaagtaagtaacatgagtcgtgcccagattctgcagcaggccggcactagtgtcctggcccaggccaatcaagtcccgcagaatgtgctgagcctactacgagagttcagtcgttacccagcccaatggcggccgctc

SEQ ID NO: 98 - DNA, 1569 bp, Artificial Sequence
  STF2.B1p.ng
atgaaattcttagtcaacgttgcccttgtttttatggtcgtatacatttcttacatctatgcggcccaagtgatcaacaccaactccctgtccctgctcactcaaaacaacctccagaaatctcagtctgctctcggtactgctatcgagcgtctctcctccggcctgaggatcaactccgctaaagatgacgccgccggacaagctatcgctaaccgctttactgccaacattaaaggcctgacccaagcctctaggaacgccaatgatggcatttctatcgctcaaaccaccgaaggcgccctgaacgaaatcaataataacctgcaacgtgtccgcgaactcgccgtccagtccgcccaatctaccaactctcagtctgacctggactctatccaagctgagatcacccaaaggctcaacgagatcgatcgtgtgtctggtcaaactcagtttaacggcgtcaaagtgctggctcaagacaacacactcaccatccaagtaggagccaatgacggcgagacaatcgatatcgacctgaagcagatcaattctcaaactctgggcctggactccctgaacgtccaaaaggcttacgacgtgaaggacaccgctgtgacaaccaaagcctatgctaatcaaggaacaaccctggacgtgtccggactcgatgacgccgctatcaaggccgctactggcggcactcagggaactgcctctgtgaccggaggcgctgtgaagttcgacgccgataacaacaaatacttcgtcactattggtggtttcactggcgctgacgccgctaagaacggtgactacgaggtcaacgtcgccactgacggaacagtgacactggccgctggcgctaccaagaccacaatgcctgctggtgctactactaagacagaggtgcaggaactcaaggacacccctgccgtggtgtccgccgatgctaagaacgctctcattgctggtggtgtcgacgctacggacgccaacggagccgagcttgtgaaaatgtcctacaccgacaagaacggaaagactatcgagggaggttacgctctgaaggctggcgataagtactacgccgctgattatgacgaagctacaggcgccattaaagctaaaaccacatcttataccgctgccgatggtactaccaagactgctgccaatcagctgggtggagtcgatggaaaaaccgaagtggtcacaatcgacggaaagacctatcaagcctccaaggctgctggccacgacttcaaggcccaacccgaactggccgaggctgctgctaaaaccactgaaaaccccctgcagaaaattgacgctgccctggcccaagtggatgccctccgctccgacctcggcgctgtgcaaaaccgcttcaactccgctattacaaacctcggcaataccgtcaatcagctctctgaagctaggtctcgtattgaggattccgattacgctaccgaggtctcccagatgtcccgtgcccaaattctccaacaagccggcacctccgtcctcgcccaagccaatcaggtgccacagaatgtgctgagc

SEQ ID NO: 99 - DNA, 63 bp, Artificial Sequence
  Honey Bee mellitin
atgaaattcttagtcaacgttgcccttgtttttatggtcgtatacatttcttacatctatgcg

SEQ ID NO: 100 - DNA, 3156 bp, Artificial Sequence
  STF2.HA0s
atgaaattcttagtcaacgttgcccttgtttttatggtcgtatacatttcttacatctatgcggcccaggttatcaataccaactccctgtcgttgctcacccaaaataaccttaataaaagccagagcgcactgggaaccgccatagaacgcctctcaagcggcctccggatcaattctgcaaaagacgacgccgccggtcaggccatcgcaaaccgctttaccgccaatatcaagggactgacgcaggcttcgaggaatgctaacgatggaataagcatcgctcaaaccacggagggcgccctgaacgagatcaacaacaacctacagcgcgtcagggagctcgcagtgcagtccgccaattcgaccaactcgcagtcggacctggactcgatccaagccgaaatcacccagcgcctgaatgagattgaccgggtgagcggtcagacacagtttaacggcgtgaaggtacttgcacaggataacacacttacgatacaggtgggcgccaacgatggtgaaaccatagacattgatctcaaacagattaacagccagacgctcgggttggatagcctgaatgtgcaaaaggcgtacgacgtgaaagacacggcggtcactaccaaagcctacgctaacaatggcactaccttggatgtgagcggattggatgatgcagcaatcaaggctgctaccggcggtacgaacggaaccgcgtccgtgaccggcggtgccgtgaagttcgatgctgacaacaataagtatttcgtcaccattggaggctttactggcgccgacgcagcaaagaacggcgactatgaagtgaacgtggcaaccgatggaaccgtgacgctggccgctggtgccaccaagaccaccatgccagccggcgccacaactaagaccgaggtgcaggagttaaaggacacccccgcggtggttagcgcagatgccaaaaacgccttgatcgccggcggagtggatgcaactgatgctaatggtgcggagctggttaaaatgtcgtatacagacaagaatggtaagacgatcgagggcggttatgcccttaaggcaggagataagtattacgctgctgattacgatgaggcgacgggagctattaaggccaagacaacgtcatacacggcggcggacggaacgactaagacggctgccaatcagttgggaggggttgacgggaagacagaggtcgttacgatcgatggcaagacatacaacgcttccaaggccgctggccacgatttcaaagctcaacccgaactggccgaggccgcggcgaaaacaactgagaacccgttgcagaagattgatgcggccctggcgcaagtagatgccctgcgctcagacctgggcgccgttcaaaatcgattcaattccgcgattacaaacctgggcaatacagtaaacaatctatccgaggccagatcccgcattgaagactccgactacgcgacagaagtaagtaacatgagtcgtgcccagattctgcagcaggccggcactagtgtcctggcccaggccaatcaagtcccgcagaatgtgctgagcctactagcatcaggttccggctcaggttccgacaccatttgcattggataccatgcaaacaactcaaccgatactgttgataccgtccttgagaagaacgttaccgtcacgcactcggtcaacctattagaggatagccacaacggaaagctgtgccgtctgaaaggcatagcgccactgcagctcggcaaatgtaacatcgcaggttggctccttggtaacccggagtgcgaccccctcctccctgtacgatcctggagttatatcgtggagacccccaatagcgagaacggaatttgctacccaggagatttcatagactacgaggagttgcgcgagcagctttcgtctgtgagcagcttcgaaaggttcgagatattcccgaaggagagcagctggccgaatcataacactaacggtgtgacagccgcctgcagtcatgaaggaaagagttcattctatcgcaacctgctgtggttgacggagaaagagggcagctaccctaagttgaagaactcctatgtgaacaaaaaaggcaaggaggttctggtgctgtggggcatacaccacccccccaatagcaaggagcagcagaatctgtaccaaaacgagaatgcctatgtgagcgtggtcactagtaactataaccgtcggttcactcccgagatcgccgagcgtccgaaggtgagggaccaggcaggccggatgaactactactggaccctattgaagccaggggacacgattatcttcgaggcaaacggaaacctcatagcgccgatgtacgccttcgccctgagccgtggctttggatcggggatcatcacgtctaacgcctcgatgcacgaatgtaataccaaatgccagaccccactgggtgctatcaactcgtccttaccctatcaaaatatacatccggtcaccataggcgagtgtcccaaatatgtcagatccgccaagttgcggatggtgaccggcctccgcaatattcctagtattcagtcacgcggcttgttcggcgccatcgctggtttcatcgaaggcgggtggacaggcatgattgatggctggtatggctatcaccaccagaacgagcagggctcgggctacgcggctgaccagaagtcgactcagaatgccatcaatggcatcacgaataaggtgaacacggtcattgaaaagatgaacattcaatttacagccgtaggaaaagagtttaataaactggaaaaaagaatggagaatctgaataagaaggtggacgacggatttttggacatctggacgtacaacgccgagctgctggttctgctggaaaatgagcgaacactggattttcatgattctaacgtaaagaatctgtacgagaaggtgaagtcccaactaaagaataatgccaaggaaatcggaaatggatgctttgagttttaccacaagtgcgataatgagtgcatggaatccgtgcgaaatggtacatacgattacccaaagtactccgaagaatccaagctaaatcgcgaaaaggttgatggtgttaaacttgaatccatgggtatttaccaacaccatcatcaccaccattaatag

SEQ ID NO: 101 - DNA, 67 bp, Artificial Sequence
  FOR PRIMER
agtcgctgagcctactagcatcaggttccggctcaggttccgacaccatttgcattggataccatgc

SEQ ID NO: 102 - DNA, 55 bp, Artificial Sequence
  REV PRIMER
agtcgcatgcctattaatggtggtgatgatggtgttggtaaatacccatggattc

SEQ ID NO: 103 - DNA, 1557 bp, Artificial Sequence
  HA0s PR8
gacaccatttgcattggataccatgcaaacaactcaaccgatactgttgataccgtccttgagaagaacgttaccgtcacgcactcggtcaacctattagaggatagccacaacggaaagctgtgccgtctgaaaggcatagcgccactgcagctcggcaaatgtaacatcgcaggttggctccttggtaacccggagtgcgaccccctcctccctgtacgatcctggagttatatcgtggagacccccaatagcgagaacggaatttgctacccaggagatttcatagactacgaggagttgcgcgagcagctttcgtctgtgagcagcttcgaaaggttcgagatattcccgaaggagagcagctggccgaatcataacactaacggtgtgacagccgcctgcagtcatgaaggaaagagttcattctatcgcaacctgctgtggttgacggagaaagagggcagctaccctaagttgaagaactcctatgtgaacaaaaaaggcaaggaggttctggtgctgtggggcatacaccacccccccaatagcaaggagcagcagaatctgtaccaaaacgagaatgcctatgtgagcgtggtcactagtaactataaccgtcggttcactcccgagatcgccgagcgtccgaaggtgagggaccaggcaggccggatgaactactactggaccctattgaagccaggggacacgattatcttcgaggcaaacggaaacctcatagcgccgatgtacgccttcgccctgagccgtggctttggatcggggatcatcacgtctaacgcctcgatgcacgaatgtaataccaaatgccagaccccactgggtgctatcaactcgtccttaccctatcaaaatatacatccggtcaccataggcgagtgtcccaaatatgtcagatccgccaagttgcggatggtgaccggcctccgcaatattcctagtattcagtcacgcggcttgttcggcgccatcgctggtttcatcgaaggcgggtggacaggcatgattgatggctggtatggctatcaccaccagaacgagcagggctcgggctacgcggctgaccagaagtcgactcagaatgccatcaatggcatcacgaataaggtgaacacggtcattgaaaagatgaacattcaatttacagccgtaggaaaagagtttaataaactggaaaaaagaatggagaatctgaataagaaggtggacgacggatttttggacatctggacgtacaacgccgagctgctggttctgctggaaaatgagcgaacactggattttcatgattctaacgtaaagaatctgtacgagaaggtgaagtcccaactaaagaataatgccaaggaaatcggaaatggatgctttgagttttaccacaagtgcgataatgagtgcatggaatccgtgcgaaatggtacatacgattacccaaagtactccgaagaatccaagctaaatcgcgaaaaggttgatggtgttaaacttgaatccatgggtatttaccaacaccatcatcaccaccattaatag

SEQ ID NO: 104 - DNA, 2439 bp, Artificial Sequence
  STF2.HA1-1
atgaaattcttagtcaacgttgcccttgtttttatggtcgtatacatttcttacatctatgcggcccaggttatcaataccaactccctgtcgttgctcacccaaaataaccttaataaaagccagagcgcactgggaaccgccatagaacgcctctcaagcggcctccggatcaattctgcaaaagacgacgccgccggtcaggccatcgcaaaccgctttaccgccaatatcaagggactgacgcaggcttcgaggaatgctaacgatggaataagcatcgctcaaaccacggagggcgccctgaacgagatcaacaacaacctacagcgcgtcagggagctcgcagtgcagtccgccaattcgaccaactcgcagtcggacctggactcgatccaagccgaaatcacccagcgcctgaatgagattgaccgggtgagcggtcagacacagtttaacggcgtgaaggtacttgcacaggataacacacttacgatacaggtgggcgccaacgatggtgaaaccatagacattgatctcaaacagattaacagccagacgctcgggttggatagcctgaatgtgcaaaaggcgtacgacgtgaaagacacggcggtcactaccaaagcctacgctaacaatggcactaccttggatgtgagcggattggatgatgcagcaatcaaggctgctaccggcggtacgaacggaaccgcgtccgtgaccggcggtgccgtgaagttcgatgctgacaacaataagtatttcgtcaccattggaggctttactggcgccgacgcagcaaagaacggcgactatgaagtgaacgtggcaaccgatggaaccgtgacgctggccgctggtgccaccaagaccaccatgccagccggcgccacaactaagaccgaggtgcaggagttaaaggacacccccgcggtggttagcgcagatgccaaaaacgccttgatcgccggcggagtggatgcaactgatgctaatggtgcggagctggttaaaatgtcgtatacagacaagaatggtaagacgatcgagggcggttatgcccttaaggcaggagataagtattacgctgctgattacgatgaggcgacgggagctattaaggccaagacaacgtcatacacggcggcggacggaacgactaagacggctgccaatcagttgggaggggttgacgggaagacagaggtcgttacgatcgatggcaagacatacaacgcttccaaggccgctggccacgatttcaaagctcaacccgaactggccgaggccgcggcgaaaacaactgagaacccgttgcagaagattgatgcggccctggcgcaagtagatgccctgcgctcagacctgggcgccgttcaaaatcgattcaattccgcgattacaaacctgggcaatacagtaaacaatctatccgaggccagatcccgcattgaagactccgactacgcgacagaagtaagtaacatgagtcgtgcccagattctgcagcaggccggcactagtgtcctggcccaggccaatcaagtcccgcagaatgtgctgagcctactagcatcaggttccggctcaggttccagccacaacggaaagctgtgccgtctgaaaggcatagcgccactgcagctcggcaaatgtaacatcgcaggttggctccttggtaacccggagtgcgaccccctcctccctgtacgatcctggagttatatcgtggagacccccaatagcgagaacggaatttgctacccaggagatttcatagactacgaggagttgcgcgagcagctttcgtctgtgagcagcttcgaaaggttcgagatattcccgaaggagagcagctggccgaatcataacactaacggtgtgacagccgcctgcagtcatgaaggaaagagttcattctatcgcaacctgctgtggttgacggagaaagagggcagctaccctaagttgaagaactcctatgtgaacaaaaaaggcaaggaggttctggtgctgtggggcatacaccacccccccaatagcaaggagcagcagaatctgtaccaaaacgagaatgcctatgtgagcgtggtcactagtaactataaccgtcggttcactcccgagatcgccgagcgtccgaaggtgagggaccaggcaggccggatgaactactactggaccctattgaagccaggggacacgattatcttcgaggcaaacggaaacctcatagcgccgatgtacgccttcgccctgagccgtggctttggatcggggatcatcacgtctaacgcctcgatgcacgaatgtaataccaaatgccagaccccactgggtgctatcaactcgtccttaccctatcaaaatatacatccggtcaccataggcgagtgtcccaaatatgtcagacaccatcatcaccaccattaatag

SEQ ID NO: 105 - DNA, 66 bp, Artificial Sequence
  FOR PRIMER
agtcgctgagcctactagcatcaggttccggctcaggttccagccacaacggaaagctgtgccgtc

SEQ ID NO: 106 - DNA, 67 bp, Artificial Sequence
  REV PRIMER
agtcgcatgcctattaatggtggtgatgatggtgtctgacatatttgggacactcgcctatggtgac

SEQ ID NO: 107 - DNA, 2292 bp, Artificial Sequence
  STF2.HA1-2
atgaaattcttagtcaacgttgcccttgtttttatggtcgtatacatttcttacatctatgcggcccaggttatcaataccaactccctgtcgttgctcacccaaaataaccttaataaaagccagagcgcactgggaaccgccatagaacgcctctcaagcggcctccggatcaattctgcaaaagacgacgccgccggtcaggccatcgcaaaccgctttaccgccaatatcaagggactgacgcaggcttcgaggaatgctaacgatgggataagcatcgctcaaaccacggagggcgccctgaacgagatcaacaacaacctacagcgcgtcagggagctcgcagtgcagtccgccaattcgaccaactcgcagtcggacctggactcgatccaagccgaaatcacccagcgcctgaacgagattgaccgggtgagcggtcagacacagtttaacggcgtgaaggtacttgcgcaggataacacacttacgatacaggtgggcgccaacgatggtgaaaccatagacattgatctcaaacagattaacagccagacgctcgggttggatagcctgaatgtgcaaaaggcgtacgacgtgaaagacacggcggtcactaccaaagcctacgctaacaatggcactaccttggatgtgagcggattggatgatgcagcaatcaaggctgctaccggcggtacgaacggaaccgcgtccgtgaccggcggtgccgtgaagttcgatgctgacaacaataagtatttcgtcaccattggaggctttactggcgccgacgcagcaaagaacggcgactatgaagtgaacgtggcaaccgatggaaccgtgacgctggccgctggtgccaccaagaccaccatgccagccggcgccacaactaagaccgaggtgcaggagttaaaggacacccccgcggtggttagcgcagatgccaaaaacgcgttgatcgccggcggagtggatgcaactgatgctaatggtgcggagctggttaaaatgtcgtatacagacaagaatggtaagacgatcgagggcggttatgcccttaaggcaggagataagtattacgctgctgattacgatgaggcgacgggagctattaaggccaagacaacgtcatacacggcggcggacggaacgactaagacggctgccaatcagttgggaggggttgacgggaagacagaggtcgttacgatcgatggcaagacatacaacgcctccaaggccgctggccacgatttcaaagctcaacccgaactggccgaggccgcggcgaaaacaactgagaacccgttgcagaagattgatgcggccctggcgcaagtagatgccctgcgctcagacctgggcgccgttcaaaatcgattcaattccgcgattacaaacctgggcaatacagtaaacaatctatccgaggccagatcccgcattgaagactccgactacgcgacagaagtaagtaacatgagtcgtgcccagattctgcagcaggccggcactagtgtcctggcccaggccaatcaagtcccgcagaatgtgctgagcctactagcatcaggttccggctcaggttccaaaggcatagcgccactgcagctcggcaaatgtaacatcgcaggttggctccttggtaacccggagtgcgaccccctcctccctgtacgatcctggagttatatcgtggagacccccaatagcgagaacggaatttgctacccaggagatttcatagactacgaggagttgcgcgagcagctttcgtctgtgagcagcttcgagaggttcgaaatcttcccgaaggagagcagctggccgaatcataacactaacggtgtgacagccgcctgcagtcatgaaggaaagagttcattctatcgcaacctgctgtggttgacggagaaagagggcagctaccctaagttgaagaactcctatgtgaacaaaaaaggcaaggaggttctggtgctgtggggcatacaccacccccccaatagcaaggagcagcagaatctgtaccaaaacgagaatgcctatgtgagcgtggtcactagtaactataaccgtcggttcactcccgagatcgccgagcgtccgaaggtgagggaccaggcaggccggatgaactactactggaccctattgaagccaggggacacgattatcttcgaggcaaacggaaacctcatagcgccgatgtacgcgttcgccctgagccgtggctttggatcggggatcatcacgtctcaccatcatcaccaccattaatag

SEQ ID NO: 108 - DNA, 66 bp, Artificial Sequence
  FOR PRIMER
agtcgctgagcctactagcatcaggttccggctcaggttccaaaggcatagcgccactgcagctcg

SEQ ID NO: 109 - DNA, 70 bp, Artificial Sequence
  REV PRIMER
agtcgcatgcctattaatggtggtgatgatggtgagacgtgatgatccccgatccaaagccacggctcag

SEQ ID NO: 110 - DNA, 2292 bp, Artificial Sequence
  STF2.HA1-2mut
atgaaattcttagtcaacgttgcccttgtttttatggtcgtatacatttcttacatctatgcggcccaggttatcaataccaactccctgtcgttgctcacccaaaataaccttaataaaagccagagcgcactgggaaccgccatagaacgcctctcaagcggcctccggatcaattctgcaaaagacgacgccgccggtcaggccatcgcaaaccgctttaccgccaatatcaagggactgacgcaggcttcgaggaatgctaacgatggaataagcatcgctcaaaccacggagggcgccctgaacgagatcaacaacaacctacagcgcgtcagggagctcgcagtgcagtccgccaattcgaccaactcgcagtcggacctggactcgatccaagccgaaatcacccagcgcctgaatgagattgaccgggtgagcggtcagacacagtttaacggcgtgaaggtacttgcacaggataacacacttacgatacaggtgggcgccaacgatggtgaaaccatagacattgatctcaaacagattaacagccagacgctcgggttggatagcctgaatgtgcaaaaggcgtacgacgtgaaagacacggcggtcactaccaaagcctacgctaacaatggcactaccttggatgtgagcggattggatgatgcagcaatcaaggctgctaccggcggtacgaacggaaccgcgtccgtgaccggcggtgccgtgaagttcgatgctgacaacaataagtatttcgtcaccattggaggctttactggcgccgacgcagcaaagaacggcgactatgaagtgaacgtggcaaccgatggaaccgtgacgctggccgctggtgccaccaagaccaccatgccagccggcgccacaactaagaccgaggtgcaggagttaaaggacacccccgcggtggttagcgcagatgccaaaaacgcgttgatcgccggcggagtggatgcaactgatgctaatggtgcggagctggttaaaatgtcgtatacagacaagaatggtaagacgatcgagggcggttatgcccttaaggcaggagataagtattacgctgctgattacgatgaggcgacgggagctattaaggccaagacaacgtcatacacggcggcggacggaacgactaagacggctgccaatcagttgggaggggttgacgggaagacagaggtcgttacgatcgatggcaagacatacaacgcctccaaggccgctggccacgatttcaaagctcaacccgaactggccgaggccgcggcgaaaacaactgagaacccgttgcagaagattgatgcggccctggcgcaagtagatgccctgcgctcagacctgggcgccgttcaaaatcgattcaattccgcgattacaaacctgggcaatacagtaaacaatctatccgaggccagatcccgcattgaagactccgactacgcgacagaagtaagtaacatgagtcgtgcccagattctgcagcaggccggcactagtgtcctggcccaggccaatcaagtcccgcagaatgtgctgagcctgctggcttctggatctggatctggttctaaaggcgctgcccctctgcaactcggcaagtgcaatattgcggggtggctgttgggcaacccagaatgtgaccccctcctgcccgtccgttcttggtctgacatcgctgaaacacctaactccgagaacggcatctgttacccgggcgacttcattgactacgaggagctccgcgaacagctgtcttctgtctcttctttcgaacgtttcgaaattttcccaaaggaatcctcctggccaaaccataacaccaacggagtgaccgccgcctgtagccatgagggcaagtcttctttctaccgtaatctgctgtggctgactgaaaaagagggttcttatcccaaactgaagaactcttatgtcaacaagaagggcaaagaggtcctggtgctgtggggtatccaccacccccccaactccaaggagcagcagaatctgtaccaaaacgaaaatgcttacgtgtctgtcgtgacatctaactacaaccggcgcttcacgcccgaaatcgccgagcgtcccaaagtgcgcgatcaggccggaaggatgaactactactggaccctgctcaaacccggagataccatcatattcgaagccaatggcaatctcatcgctcccatgtatgctttcgctctctctcgcggattcggttccggcataatcactagccaccaccaccaccaccactaatag

SEQ ID NO: 111 - DNA, 692 bp, Artificial Sequence
  HA1-2mut
aaggcgctgcccctctgcaactcggcaagtgcaatattgcggggtggctgttgggcaacccagaatgtgaccccctcctgcccgtccgttcttggtctgacatcgctgaaacacctaactccgagaacggcatctgttacccgggcgacttcattgactacgaggagctccgcgaacagctgtcttctgtctcttctttcgaacgtttcgaaattttcccaaaggaatcctcctggccaaaccataacaccaacggagtgaccgccgcctgtagccatgagggcaagtcttctttctaccgtaatctgctgtggctgactgaaaaagagggttcttatcccaaactgaagaactcttatgtcaacaagaagggcaaagaggtcctggtgctgtggggtatccaccacccccccaactccaaggagcagcagaatctgtaccaaaacgaaaatgcttacgtgtctgtcgtgacatctaactacaaccggcgcttcacgcccgaaatcgccgagcgtcccaaagtgcgcgatcaggccggaaggatgaactactactggaccctgctcaaacccggagataccatcatattcgaagccaatggcaatctcatcgctcccatgtatgctttcgctctctctcgcggattcggttccggcataatcactagccaccaccaccaccaccactaatag

SEQ ID NO: 112 - DNA, 2151 bp, Artificial Sequence
  STF2.HA1-3
atgaaattcttagtcaacgttgcccttgtttttatggtcgtatacatttcttacatctatgcggcccaggttatcaataccaactccctgtcgttgctcacccaaaataaccttaataaaagccagagcgcactgggaaccgccatagaacgcctctcaagcggcctccggatcaattctgcaaaagacgacgccgccggtcaggccatcgcaaaccgctttaccgccaatatcaagggactgacgcaggcttcgaggaatgctaacgatgggataagcatcgctcaaaccacggagggcgccctgaacgagatcaacaacaacctacagcgcgtcagggagctcgcagtgcagtccgccaattcgaccaactcgcagtcggacctggactcgatccaagccgaaatcacccagcgcctgaacgagattgaccgggtgagcggtcagacacagtttaacggcgtgaaggtacttgcgcaggataacacacttacgatacaggtgggcgccaacgatggtgaaaccatagacattgatctcaaacagattaacagccagacgctcgggttggatagcctgaatgtgcaaaaggcgtacgacgtgaaagacacggcggtcactaccaaagcctacgctaacaatggcactaccttggatgtgagcggattggatgatgcagcaatcaaggctgctaccggcggtacgaacggaaccgcgtccgtgaccggcggtgccgtgaagttcgatgctgacaacaataagtatttcgtcaccattggaggctttactggcgccgacgcagcaaagaacggcgactatgaagtgaacgtggcaaccgatggaaccgtgacgctggccgctggtgccaccaagaccaccatgccagccggcgccacaactaagaccgaggtgcaggagttaaaggacacccccgcggtggttagcgcagatgccaaaaacgcgttgatcgccggcggagtggatgcaactgatgctaatggtgcggagctggttaaaatgtcgtatacagacaagaatggtaagacgatcgagggcggttatgcccttaaggcaggagataagtattacgctgctgattacgatgaggcgacgggagctattaaggccaagacaacgtcatacacggcggcggacggaacgactaagacggctgccaatcagttgggaggggttgacgggaagacagaggtcgttacgatcgatggcaagacatacaacgcctccaaggccgctggccacgatttcaaagctcaacccgaactggccgaggccgcggcgaaaacaactgagaacccgttgcagaagattgatgcggccctggcgcaagtagatgccctgcgctcagacctgggcgccgttcaaaatcgattcaattccgcgattacaaacctgggcaatacagtaaacaatctatccgaggccagatcccgcattgaagactccgactacgcgacagaagtaagtaacatgagtcgtgcccagattctgcagcaggccggcactagtgtcctggcccaggccaatcaagtcccgcagaatgtgctgagcctactagcatcaggttccggctcaggttccaatagcgagaacggaatttgctacccaggagatttcatagactacgaggagttgcgcgagcagctttcgtctgtgagcagcttcgagaggttcgaaatcttcccgaaggagagcagctggccgaatcataacactaacggtgtgacagccgcctgcagtcatgaaggaaagagttcattctatcgcaacctgctgtggttgacggagaaggagggcagctaccctaagctgaagaactcctatgtgaacaaaaaaggcaaggaggttctggtgctgtggggcatacaccacccccccaatagcaaggagcagcagaatctgtaccaaaacgagaatgcctatgtgagcgtggtcactagtaactataaccgtcggttcactcccgagatcgccgagcgtccgaaggtgagggaccaggcaggccggatgaactactactggaccctattgaagccaggggacacgattatcttcgaggcaaacggaaacctcatagcgccgatgtacgccttcgccctgagccgtggccaccatcatcaccaccattaatag

SEQ ID NO: 113 - DNA, 66 bp, Artificial Sequence
  FOR PRIMER
agtcgctgagcctactagcatcaggttccggctcaggttccaatagcgagaacggaatttgctacc

SEQ ID NO: 114 - DNA, 54 bp, Artificial Sequence
  REV PRIMER
agtcgcatgcctattaatggtggtgatgatggtggccacggctcagggcgaagg

SEQ ID NO: 115 - DNA, 2151 bp, Artificial Sequence
  STF2.HA1-3mut
atgaaattcttagtcaacgttgcccttgtttttatggtcgtatacatttcttacatctatgcggcccaggttatcaataccaactccctgtcgttgctcacccaaaataaccttaataaaagccagagcgcactgggaaccgccatagaacgcctctcaagcggcctccggatcaattctgcaaaagacgacgccgccggtcaggccatcgcaaaccgctttaccgccaatatcaagggactgacgcaggcttcgaggaatgctaacgatggaataagcatcgctcaaaccacggagggcgccctgaacgagatcaacaacaacctacagcgcgtcagggagctcgcagtgcagtccgccaattcgaccaactcgcagtcggacctggactcgatccaagccgaaatcacccagcgcctgaatgagattgaccgggtgagcggtcagacacagtttaacggcgtgaaggtacttgcacaggataacacacttacgatacaggtgggcgccaacgatggtgaaaccatagacattgatctcaaacagattaacagccagacgctcgggttggatagcctgaatgtgcaaaaggcgtacgacgtgaaagacacggcggtcactaccaaagcctacgctaacaatggcactaccttggatgtgagcggattggatgatgcagcaatcaaggctgctaccggcggtacgaacggaaccgcgtccgtgaccggcggtgccgtgaagttcgatgctgacaacaataagtatttcgtcaccattggaggctttactggcgccgacgcagcaaagaacggcgactatgaagtgaacgtggcaaccgatggaaccgtgacgctggccgctggtgccaccaagaccaccatgccagccggcgccacaactaagaccgaggtgcaggagttaaaggacacccccgcggtggttagcgcagatgccaaaaacgcgttgatcgccggcggagtggatgcaactgatgctaatggtgcggagctggttaaaatgtcgtatacagacaagaatggtaagacgatcgagggcggttatgcccttaaggcaggagataagtattacgctgctgattacgatgaggcgacgggagctattaaggccaagacaacgtcatacacggcggcggacggaacgactaagacggctgccaatcagttgggaggggttgacgggaagacagaggtcgttacgatcgatggcaagacatacaacgcctccaaggccgctggccacgatttcaaagctcaacccgaactggccgaggccgcggcgaaaacaactgagaacccgttgcagaagattgatgcggccctggcgcaagtagatgccctgcgctcagacctgggcgccgttcaaaatcgattcaattccgcgattacaaacctgggcaatacagtaaacaatctatccgaggccagatcccgcattgaagactccgactacgcgacagaagtaagtaacatgagtcgtgcccagattctgcagcaggccggcactagtgtcctggcccaggccaatcaagtcccgcagaatgtgctgagcctgctggcttctggatctggatctggttctaactccgagaacgaaatctgttacccgggcgacttcattgacaaagaggagctccgcgaacagctgtcttctgtctcttctttcgaacgtttcgaaattttcccaaaggaatcctcctggccaaaccataacaccaacggagtgaccgccgcctgtagccatgagggcaagtcttctttctaccgtaatctgctgtggctgactgaaaaagagggttcttatcccaaactgaagaactcttatgtcaacaagaagggcaaagaggtcctggtgctgtggggtatccaccacccccccaactccaaggagcagcagaatctgtaccaaaacgaaaatgcttacgtgtctgtcgtgacatctaactacaaccggcgcttcacgcccgaaatcgccgagcgtcccaaagtgcgcgatcaggccggaaggatgaactactactggaccctgctcaaacccggagataccatcatattcgaagccaatggcaatctcatcgctcccatgtatgctgctgctctctctcgcggacaccaccaccaccaccactaatag

SEQ ID NO: 116 - DNA, 552 bp, Artificial Sequence
  HA1-3mut PR8
aactccgagaacgaaatctgttacccgggcgacttcattgacaaagaggagctccgcgaacagctgtcttctgtctcttctttcgaacgtttcgaaattttcccaaaggaatcctcctggccaaaccataacaccaacggagtgaccgccgcctgtagccatgagggcaagtcttctttctaccgtaatctgctgtggctgactgaaaaagagggttcttatcccaaactgaagaactcttatgtcaacaagaagggcaaagaggtcctggtgctgtggggtatccaccacccccccaactccaaggagcagcagaatctgtaccaaaacgaaaatgcttacgtgtctgtcgtgacatctaactacaaccggcgcttcacgcccgaaatcgccgagcgtcccaaagtgcgcgatcaggccggaaggatgaactactactggaccctgctcaaacccggagataccatcatattcgaagccaatggcaatctcatcgctcccatgtatgctgctgctctctctcgcggacaccaccaccaccaccactaatag

SEQ ID NO: 117 - DNA, 3156 bp, Artificial Sequence
  ngSTF2.HA0s
atgaaattcttagtcaacgttgcccttgtttttatggtcgtatacatttcttacatctatgcggcccaagtgatcaacaccaactccctgtccctgctcactcaaaacaacctccagaaatctcagtctgctctcggtactgctatcgagcgtctctcctccggcctgaggatcaactccgctaaagatgacgccgccggacaagctatcgctaaccgctttactgccaacattaaaggcctgacccaagcctctaggaacgccaatgatggcatttctatcgctcaaaccaccgaaggcgccctgaacgaaatcaataataacctgcaacgtgtccgcgaactcgccgtccagtccgcccaatctaccaactctcagtctgacctggactctatccaagctgagatcacccaaaggctcaacgagatcgatcgtgtgtctggtcaaactcagtttaacggcgtcaaagtgctggctcaagacaacacactcaccatccaagtaggagccaatgacggcgagacaatcgatatcgacctgaagcagatcaattctcaaactctgggcctggactccctgaacgtccaaaaggcttacgacgtgaaggacaccgctgtgacaaccaaagcctatgctaatcaaggaacaaccctggacgtgtccggactcgatgacgccgctatcaaggccgctactggcggcactcagggaactgcctctgtgaccggaggcgctgtgaagttcgacgccgataacaacaaatacttcgtcactattggtggtttcactggcgctgacgccgctaagaacggtgactacgaggtcaacgtcgccactgacggaacagtgacactggccgctggcgctaccaagaccacaatgcctgctggtgctactactaagacagaggtgcaggaactcaaggacacccctgccgtggtgtccgccgatgctaagaacgctctcattgctggtggtgtcgacgctacggacgccaacggagccgagcttgtgaaaatgtcctacaccgacaagaacggaaagactatcgagggaggttacgctctgaaggctggcgataagtactacgccgctgattatgacgaagctacaggcgccattaaagctaaaaccacatcttataccgctgccgatggtactaccaagactgctgccaatcagctgggtggagtcgatggaaaaaccgaagtggtcacaatcgacggaaagacctatcaagcctccaaggctgctggccacgacttcaaggcccaacccgaactggccgaggctgctgctaaaaccactgaaaaccccctgcagaaaattgacgctgccctggcccaagtggatgccctccgctccgacctcggcgctgtgcaaaaccgcttcaactccgctattacaaacctcggcaataccgtcaatcaactctctgaagctaggtctcgtattgaggattccgattacgctaccgaggtctcccagatgtcccgtgcccaaattctccaacaagccggcacctccgtcctcgcccaagccaatcaggtgccacagaatgtgctgagcctgctggcttctggatctggatctggttctgacaccatctgcattggctaccatgcccagcagtctacagatacagtcgataccgtcctggagaaacaagtcaccgtcacgcactccgtgaacctcctggaggactcccataatggcaaattgtgtcggctgaaaggcatcgcccctctgcaactcggcaagtgcaatattgcggggtggctgttgggcaacccagaatgtgaccccctcctgcccgtccgttcttggtcttacatcgtggaaacacctaactccgagaacggcatctgttacccgggcgacttcattgactacgaggagctccgcgaacagctgtcttctgtctcttctttcgaacgtttcgaaattttcccaaaggaatcctcctggccaaaccataacaccaacggagtgaccgccgcctgtagccatgagggcaagtcttctttctaccgtaatctgctgtggctgactgaaaaagagggttcttatcccaaactgaagaactcttatgtcaacaagaagggcaaagaggtcctggtgctgtggggtatccaccacccccccaactccaaggagcagcagaatctgtaccaaaacgaaaatgcttacgtgtctgtcgtgacatctaactacaaccggcgcttcacgcccgaaatcgccgagcgtcccaaagtgcgcgatcaggccggaaggatgaactactactggaccctgctcaaacccggagataccatcatattcgaagccaatggcaatctcatcgctcccatgtatgctttcgctctctctcgcggattcggttccggcataatcactagccaagcctccatgcacgagtgcaataccaagtgtcaaactccactgggagccattcaaagctccctgccctaccaaaacatccatcctgtgaccattggagagtgccctaaatacgtgcgcagcgcgaaactgcgcatggtgaccggtctccgcaatataccctccatacaatcgcgcggcctgtttggtgctatcgctggctttatcgagggaggatggactggaatgatcgacggctggtatggctatcatcatcaaaacgaacagggttccggctacgccgctgaccaaaagtccactcaaaacgccattaacggtattacaaacaaagtaaacaccgtgatagagaaaatgaatatccaattcactgccgtgggcaaagagtttaacaagctggagaagcgcatggaaaatctgaacaaaaaagtcgatgatggcttcctcgacatctggacttacaacgccgaactcctcgtgctgctcgaaaacgagaggactctggacttccacgactccaacgtgaagaacctgtacgagaaagtcaaatcccaactcaagaacaacgccaaagaaatcggcaacggctgcttcgagttctaccacaaatgtgataacgagtgtatggaatccgtacggcaaggcacttacgactaccccaaatacagcgaagagagcaaattgaaccgcgagaaagtggacggcgtgaaactggagtccatgggcatctatcagcaccaccaccaccaccactaatag

SEQ ID NO: 118 - DNA, 1557 bp, Artificial Sequence
  ngHA0s
gacaccatctgcattggctaccatgcccagcagtctacagatacagtcgataccgtcctggagaaacaagtcaccgtcacgcactccgtgaacctcctggaggactcccataatggcaaattgtgtcggctgaaaggcatcgcccctctgcaactcggcaagtgcaatattgcggggtggctgttgggcaacccagaatgtgaccccctcctgcccgtccgttcttggtcttacatcgtggaaacacctaactccgagaacggcatctgttacccgggcgacttcattgactacgaggagctccgcgaacagctgtcttctgtctcttctttcgaacgtttcgaaattttcccaaaggaatcctcctggccaaaccataacaccaacggagtgaccgccgcctgtagccatgagggcaagtcttctttctaccgtaatctgctgtggctgactgaaaaagagggttcttatcccaaactgaagaactcttatgtcaacaagaagggcaaagaggtcctggtgctgtggggtatccaccacccccccaactccaaggagcagcagaatctgtaccaaaacgaaaatgcttacgtgtctgtcgtgacatctaactacaaccggcgcttcacgcccgaaatcgccgagcgtcccaaagtgcgcgatcaggccggaaggatgaactactactggaccctgctcaaacccggagataccatcatattcgaagccaatggcaatctcatcgctcccatgtatgctttcgctctctctcgcggattcggttccggcataatcactagccaagcctccatgcacgagtgcaataccaagtgtcaaactccactgggagccattcaaagctccctgccctaccaaaacatccatcctgtgaccattggagagtgccctaaatacgtgcgcagcgcgaaactgcgcatggtgaccggtctccgcaatataccctccatacaatcgcgcggcctgtttggtgctatcgctggctttatcgagggaggatggactggaatgatcgacggctggtatggctatcatcatcaaaacgaacagggttccggctacgccgctgaccaaaagtccactcaaaacgccattaacggtattacaaacaaagtaaacaccgtgatagagaaaatgaatatccaattcactgccgtgggcaaagagtttaacaagctggagaagcgcatggaaaatctgaacaaaaaagtcgatgatggcttcctcgacatctggacttacaacgccgaactcctcgtgctgctcgaaaacgagaggactctggacttccacgactccaacgtgaagaacctgtacgagaaagtcaaatcccaactcaagaacaacgccaaagaaatcggcaacggctgcttcgagttctaccacaaatgtgataacgagtgtatggaatccgtacggcaaggcacttacgactaccccaaatacagcgaagagagcaaattgaaccgcgagaaagtggacggcgtgaaactggagtccatgggcatctatcagcaccaccaccaccaccactaatag

SEQ ID NO: 119 - DNA, 2439 bp, Artificial Sequence
  ngSTF2.HA1-1
atgaaattcttagtcaacgttgcccttgtttttatggtcgtatacatttcttacatctatgcggcccaagtgatcaacaccaactccctgtccctgctcactcaaaacaacctccagaaatctcagtctgctctcggtactgctatcgagcgtctctcctccggcctgaggatcaactccgctaaagatgacgccgccggacaagctatcgctaaccgctttactgccaacattaaaggcctgacccaagcctctaggaacgccaatgatggcatttctatcgctcaaaccaccgaaggcgccctgaacgaaatcaataataacctgcaacgtgtccgcgaactcgccgtccagtccgcccaatctaccaactctcagtctgacctggactctatccaagctgagatcacccaaaggctcaacgagatcgatcgtgtgtctggtcaaactcagtttaacggcgtcaaagtgctggctcaagacaacacactcaccatccaagtaggagccaatgacggcgagacaatcgatatcgacctgaagcagatcaattctcaaactctgggcctggactccctgaacgtccaaaaggcttacgacgtgaaggacaccgctgtgacaaccaaagcctatgctaatcaaggaacaaccctggacgtgtccggactcgatgacgccgctatcaaggccgctactggcggcactcagggaactgcctctgtgaccggaggcgctgtgaagttcgacgccgataacaacaaatacttcgtcactattggtggtttcactggcgctgacgccgctaagaacggtgactacgaggtcaacgtcgccactgacggaacagtgacactggccgctggcgctaccaagaccacaatgcctgctggtgctactactaagacagaggtgcaggaactcaaggacacccctgccgtggtgtccgccgatgctaagaacgctctcattgctggtggtgtcgacgctacggacgccaacggagccgagcttgtgaaaatgtcctacaccgacaagaacggaaagactatcgagggaggttacgctctgaaggctggcgataagtactacgccgctgattatgacgaagctacaggcgccattaaagctaaaaccacatcttataccgctgccgatggtactaccaagactgctgccaatcagctgggtggagtcgatggaaaaaccgaagtggtcacaatcgacggaaagacctatcaagcctccaaggctgctggccacgacttcaaggcccaacccgaactggccgaggctgctgctaaaaccactgaaaaccccctgcagaaaattgacgctgccctggcccaagtggatgccctccgctccgacctcggcgctgtgcaaaaccgcttcaactccgctattacaaacctcggcaataccgtcaatcagctctctgaagctaggtctcgtattgaggattccgattacgctaccgaggtctcccagatgtcccgtgcccaaattctccaacaagccggcacctccgtcctcgcccaagccaatcaggtgccacagaatgtgctgagcctgctggcttctggatctggatctggttcttcccataatggcaaattgtgtcggctgaaaggcatcgcccctctgcaactcggcaagtgcaatattgcggggtggctgttgggcaacccagaatgtgaccccctcctgcccgtccgttcttggtcttacatcgtggaaacacctaactccgagaacggcatctgttacccgggcgacttcattgactacgaggagctccgcgaacagctgtcttctgtctcttctttcgaacgtttcgaaattttcccaaaggaatcctcctggccaaaccataacaccaacggagtgaccgccgcctgtagccatgagggcaagtcttctttctaccgtaatctgctgtggctgactgaaaaagagggttcttatcccaaactgaagaactcttatgtcaacaagaagggcaaagaggtcctggtgctgtggggtatccaccacccccccaactccaaggagcagcagaatctgtaccaaaacgaaaatgcttacgtgtctgtcgtgacatctaactacaaccggcgcttcacgcccgaaatcgccgagcgtcccaaagtgcgcgatcaggccggaaggatgaactactactggaccctgctcaaacccggagataccatcatattcgaagccaatggcaatctcatcgctcccatgtatgctttcgctctctctcgcggattcggttccggcataatcactagccaagcctccatgcacgagtgcaataccaagtgtcaaactccactgggagccattcaaagctccctgccctaccaaaacatccatcctgtgaccattggagagtgccctaaatacgtgcgccaccaccaccaccaccactaatag

SEQ ID NO: 120 - DNA, 840 bp, Artificial Sequence
  ng HA1-1
tcccataatggcaaattgtgtcggctgaaaggcatcgcccctctgcaactcggcaagtgcaatattgcggggtggctgttgggcaacccagaatgtgaccccctcctgcccgtccgttcttggtcttacatcgtggaaacacctaactccgagaacggcatctgttacccgggcgacttcattgactacgaggagctccgcgaacagctgtcttctgtctcttctttcgaacgtttcgaaattttcccaaaggaatcctcctggccaaaccataacaccaacggagtgaccgccgcctgtagccatgagggcaagtcttctttctaccgtaatctgctgtggctgactgaaaaagagggttcttatcccaaactgaagaactcttatgtcaacaagaagggcaaagaggtcctggtgctgtggggtatccaccacccccccaactccaaggagcagcagaatctgtaccaaaacgaaaatgcttacgtgtctgtcgtgacatctaactacaaccggcgcttcacgcccgaaatcgccgagcgtcccaaagtgcgcgatcaggccggaaggatgaactactactggaccctgctcaaacccggagataccatcatattcgaagccaatggcaatctcatcgctcccatgtatgctttcgctctctctcgcggattcggttccggcataatcactagccaagcctccatgcacgagtgcaataccaagtgtcaaactccactgggagccattcaaagctccctgccctaccaaaacatccatcctgtgaccattggagagtgccctaaatacgtgcgccaccaccaccaccaccactaatag

SEQ ID NO: 121 - DNA, 2292 bp, Artificial Sequence
  ngSTF2.HA1-2
atgaaattcttagtcaacgttgcccttgtttttatggtcgtatacatttcttacatctatgcggcccaagtgatcaacaccaactccctgtccctgctcactcaaaacaacctccagaaatctcagtctgctctcggtactgctatcgagcgtctctcctccggcctgaggatcaactccgctaaagatgacgccgccggacaagctatcgctaaccgctttactgccaacattaaaggcctgacccaagcctctaggaacgccaatgatggcatttctatcgctcaaaccaccgaaggcgccctgaacgaaatcaataataacctgcaacgtgtccgcgaactcgccgtccagtccgcccaatctaccaactctcagtctgacctggactctatccaagctgagatcacccaaaggctcaacgagatcgatcgtgtgtctggtcaaactcagtttaacggcgtcaaagtgctggctcaagacaacacactcaccatccaagtaggagccaatgacggcgagacaatcgatatcgacctgaagcagatcaattctcaaactctgggcctggactccctgaacgtccaaaaggcttacgacgtgaaggacaccgctgtgacaaccaaagcctatgctaatcaaggaacaaccctggacgtgtccggactcgatgacgccgctatcaaggccgctactggcggcactcagggaactgcctctgtgaccggaggcgctgtgaagttcgacgccgataacaacaaatacttcgtcactattggtggtttcactggcgctgacgccgctaagaacggtgactacgaggtcaacgtcgccactgacggaacagtgacactggccgctggcgctaccaagaccacaatgcctgctggtgctactactaagacagaggtgcaggaactcaaggacacccctgccgtggtgtccgccgatgctaagaacgctctcattgctggtggtgtcgacgctacggacgccaacggagccgagcttgtgaaaatgtcctacaccgacaagaacggaaagactatcgagggaggttacgctctgaaggctggcgataagtactacgccgctgattatgacgaagctacaggcgccattaaagctaaaaccacatcttataccgctgccgatggtactaccaagactgctgccaatcagctgggtggagtcgatggaaaaaccgaagtggtcacaatcgacggaaagacctatcaagcctccaaggctgctggccacgacttcaaggcccaacccgaactggccgaggctgctgctaaaaccactgaaaaccccctgcagaaaattgacgctgccctggcccaagtggatgccctccgctccgacctcggcgctgtgcaaaaccgcttcaactccgctattacaaacctcggcaataccgtcaatcagctctctgaagctaggtctcgtattgaggattccgattacgctaccgaggtctcccagatgtcccgtgcccaaattctccaacaagccggcacctccgtcctcgcccaagccaatcaggtgccacagaatgtgctgagcctactagcatcaggttccggctcaggttccaaaggcatagcgccactgcagctcggcaaatgtaacatcgcaggttggctccttggtaacccggagtgcgaccccctcctccctgtacgatcctggagttatatcgtggagacccccaatagcgagaacggaatttgctacccaggagatttcatagactacgaggagttgcgcgagcagctttcgtctgtgagcagcttcgagaggttcgaaatcttcccgaaggagagcagctggccgaatcataacactaacggtgtgacagccgcctgcagtcatgaaggaaagagttcattctatcgcaacctgctgtggttgacggagaaagagggcagctaccctaagttgaagaactcctatgtgaacaaaaaaggcaaggaggttctggtgctgtggggcatacaccacccccccaatagcaaggagcagcagaatctgtaccaaaacgagaatgcctatgtgagcgtggtcactagtaactataaccgtcggttcactcccgagatcgccgagcgtccgaaggtgagggaccaggcaggccggatgaactactactggaccctattgaagccaggggacacgattatcttcgaggcaaacggaaacctcatagcgccgatgtacgcgttcgccctgagccgtggctttggatcggggatcatcacgtctcaccatcatcaccaccattaatag

SEQ ID NO: 122 - DNA, 693 bp, Artificial Sequence
  ng HA1-2
aaaggcatagcgccactgcagctcggcaaatgtaacatcgcaggttggctccttggtaacccggagtgcgaccccctcctccctgtacgatcctggagttatatcgtggagacccccaatagcgagaacggaatttgctacccaggagatttcatagactacgaggagttgcgcgagcagctttcgtctgtgagcagcttcgaaaggttcgagatattcccgaaggagagcagctggccgaatcataacactaacggtgtgacagccgcctgcagtcatgaaggaaagagttcattctatcgcaacctgctgtggttgacggagaaagagggcagctaccctaagttgaagaactcctatgtgaacaaaaaaggcaaggaggttctggtgctgtggggcatacaccacccccccaatagcaaggagcagcagaatctgtaccaaaacgagaatgcctatgtgagcgtggtcactagtaactataaccgtcggttcactcccgagatcgccgagcgtccgaaggtgagggaccaggcaggccggatgaactactactggaccctattgaagccaggggacacgattatcttcgaggcaaacggaaacctcatagcgccgatgtacgccttcgccctgagccgtggctttggatcggggatcatcacgtctcaccatcatcaccaccattaatag

SEQ ID NO: 123 - DNA, 2292 bp, Artificial Sequence
  ngSTF2.HA1-2mut
atgaaattcttagtcaacgttgcccttgtttttatggtcgtatacatttcttacatctatgcggcccaagtgatcaacaccaactccctgtccctgctcactcaaaacaacctccagaaatctcagtctgctctcggtactgctatcgagcgtctctcctccggcctgaggatcaactccgctaaagatgacgccgccggacaagctatcgctaaccgctttactgccaacattaaaggcctgacccaagcctctaggaacgccaatgatggcatttctatcgctcaaaccaccgaaggcgccctgaacgaaatcaataataacctgcaacgtgtccgcgaactcgccgtccagtccgcccaatctaccaactctcagtctgacctggactctatccaagctgagatcacccaaaggctcaacgagatcgatcgtgtgtctggtcaaactcagtttaacggcgtcaaagtgctggctcaagacaacacactcaccatccaagtaggagccaatgacggcgagacaatcgatatcgacctgaagcagatcaattctcaaactctgggcctggactccctgaacgtccaaaaggcttacgacgtgaaggacaccgctgtgacaaccaaagcctatgctaatcaaggaacaaccctggacgtgtccggactcgatgacgccgctatcaaggccgctactggcggcactcagggaactgcctctgtgaccggaggcgctgtgaagttcgacgccgataacaacaaatacttcgtcactattggtggtttcactggcgctgacgccgctaagaacggtgactacgaggtcaacgtcgccactgacggaacagtgacactggccgctggcgctaccaagaccacaatgcctgctggtgctactactaagacagaggtgcaggaactcaaggacacccctgccgtggtgtccgccgatgctaagaacgctctcattgctggtggtgtcgacgctacggacgccaacggagccgagcttgtgaaaatgtcctacaccgacaagaacggaaagactatcgagggaggttacgctctgaaggctggcgataagtactacgccgctgattatgacgaagctacaggcgccattaaagctaaaaccacatcttataccgctgccgatggtactaccaagactgctgccaatcagctgggtggagtcgatggaaaaaccgaagtggtcacaatcgacggaaagacctatcaagcctccaaggctgctggccacgacttcaaggcccaacccgaactggccgaggctgctgctaaaaccactgaaaaccccctgcagaaaattgacgctgccctggcccaagtggatgccctccgctccgacctcggcgctgtgcaaaaccgcttcaactccgctattacaaacctcggcaataccgtcaatcagctctctgaagctaggtctcgtattgaggattccgattacgctaccgaggtctcccagatgtcccgtgcccaaattctccaacaagccggcacctccgtcctcgcccaagccaatcaggtgccacagaatgtgctgagcctgctggcttctggatctggatctggttctaaaggcgctgcccctctgcaactcggcaagtgcaatattgcggggtggctgttgggcaacccagaatgtgaccccctcctgcccgtccgttcttggtctgacatcgctgaaacacctaactccgagaacggcatctgttacccgggcgacttcattgactacgaggagctccgcgaacagctgtcttctgtctcttctttcgaacgtttcgaaattttcccaaaggaatcctcctggccaaaccataacaccaacggagtgaccgccgcctgtagccatgagggcaagtcttctttctaccgtaatctgctgtggctgactgaaaaagagggttcttatcccaaactgaagaactcttatgtcaacaagaagggcaaagaggtcctggtgctgtggggtatccaccacccccccaactccaaggagcagcagaatctgtaccaaaacgaaaatgcttacgtgtctgtcgtgacatctaactacaaccggcgcttcacgcccgaaatcgccgagcgtcccaaagtgcgcgatcaggccggaaggatgaactactactggaccctgctcaaacccggagataccatcatattcgaagccaatggcaatctcatcgctcccatgtatgctttcgctctctctcgcggattcggttccggcataatcactagccaccaccaccaccaccactaatag

SEQ ID NO: 124 - DNA, 693 bp, Artificial Sequence
  ngHA1-2mut
aaaggcgctgcccctctgcaactcggcaagtgcaatattgcggggtggctgttgggcaacccagaatgtgaccccctcctgcccgtccgttcttggtctgacatcgctgaaacacctaactccgagaacggcatctgttacccgggcgacttcattgactacgaggagctccgcgaacagctgtcttctgtctcttctttcgaacgtttcgaaattttcccaaaggaatcctcctggccaaaccataacaccaacggagtgaccgccgcctgtagccatgagggcaagtcttctttctaccgtaatctgctgtggctgactgaaaaagagggttcttatcccaaactgaagaactcttatgtcaacaagaagggcaaagaggtcctggtgctgtggggtatccaccacccccccaactccaaggagcagcagaatctgtaccaaaacgaaaatgcttacgtgtctgtcgtgacatctaactacaaccggcgcttcacgcccgaaatcgccgagcgtcccaaagtgcgcgatcaggccggaaggatgaactactactggaccctgctcaaacccggagataccatcatattcgaagccaatggcaatctcatcgctcccatgtatgctttcgctctctctcgcggattcggttccggcataatcactagccaccaccaccaccaccactaatag

SEQ ID NO: 125 - DNA, 2151 bp, Artificial Sequence
  ngSTF2.HA1-3
atgaaattcttagtcaacgttgcccttgtttttatggtcgtatacatttcttacatctatgcggcccaagtgatcaacaccaactccctgtccctgctcactcaaaacaacctccagaaatctcagtctgctctcggtactgctatcgagcgtctctcctccggcctgaggatcaactccgctaaagatgacgccgccggacaagctatcgctaaccgctttactgccaacattaaaggcctgacccaagcctctaggaacgccaatgatggcatttctatcgctcaaaccaccgaaggcgccctgaacgaaatcaataataacctgcaacgtgtccgcgaactcgccgtccagtccgcccaatctaccaactctcagtctgacctggactctatccaagctgagatcacccaaaggctcaacgagatcgatcgtgtgtctggtcaaactcagtttaacggcgtcaaagtgctggctcaagacaacacactcaccatccaagtaggagccaatgacggcgagacaatcgatatcgacctgaagcagatcaattctcaaactctgggcctggactccctgaacgtccaaaaggcttacgacgtgaaggacaccgctgtgacaaccaaagcctatgctaatcaaggaacaaccctggacgtgtccggactcgatgacgccgctatcaaggccgctactggcggcactcagggaactgcctctgtgaccggaggcgctgtgaagttcgacgccgataacaacaaatacttcgtcactattggtggtttcactggcgctgacgccgctaagaacggtgactacgaggtcaacgtcgccactgacggaacagtgacactggccgctggcgctaccaagaccacaatgcctgctggtgctactactaagacagaggtgcaggaactcaaggacacccctgccgtggtgtccgccgatgctaagaacgctctcattgctggtggtgtcgacgctacggacgccaacggagccgagcttgtgaaaatgtcctacaccgacaagaacggaaagactatcgagggaggttacgctctgaaggctggcgataagtactacgccgctgattatgacgaagctacaggcgccattaaagctaaaaccacatcttataccgctgccgatggtactaccaagactgctgccaatcagctgggtggagtcgatggaaaaaccgaagtggtcacaatcgacggaaagacctatcaagcctccaaggctgctggccacgacttcaaggcccaacccgaactggccgaggctgctgctaaaaccactgaaaaccccctgcagaaaattgacgctgccctggcccaagtggatgccctccgctccgacctcggcgctgtgcaaaaccgcttcaactccgctattacaaacctcggcaataccgtcaatcagctctctgaagctaggtctcgtattgaggattccgattacgctaccgaggtctcccagatgtcccgtgcccaaattctccaacaagccggcacctccgtcctcgcccaagccaatcaggtgccacagaatgtgctgagcctactagcatcaggttccggctcaggttccaatagcgagaacggaatttgctacccaggagatttcatagactacgaggagttgcgcgagcagctttcgtctgtgagcagcttcgagaggttcgaaatcttcccgaaggagagcagctggccgaatcataacactaacggtgtgacagccgcctgcagtcatgaaggaaagagttcattctatcgcaacctgctgtggttgacggagaaggagggcagctaccctaagctgaagaactcctatgtgaacaaaaaaggcaaggaggttctggtgctgtggggcatacaccacccccccaatagcaaggagcagcagaatctgtaccaaaacgagaatgcctatgtgagcgtggtcactagtaactataaccgtcggttcactcccgagatcgccgagcgtccgaaggtgagggaccaggcaggccggatgaactactactggaccctattgaagccaggggacacgattatcttcgaggcaaacggaaacctcatagcgccgatgtacgccttcgccctgagccgtggccaccatcatcaccaccattaatag

SEQ ID NO: 126 - DNA, 552 bp, Artificial Sequence
  ngHA1-3
aatagcgagaacggaatttgctacccaggagatttcatagactacgaggagttgcgcgagcagctttcgtctgtgagcagcttcgaaaggttcgagatattcccgaaggagagcagctggccgaatcataacactaacggtgtgacagccgcctgcagtcatgaaggaaagagttcattctatcgcaacctgctgtggttgacggagaaagagggcagctaccctaagttgaagaactcctatgtgaacaaaaaaggcaaggaggttctggtgctgtggggcatacaccacccccccaatagcaaggagcagcagaatctgtaccaaaacgagaatgcctatgtgagcgtggtcactagtaactataaccgtcggttcactcccgagatcgccgagcgtccgaaggtgagggaccaggcaggccggatgaactactactggaccctattgaagccaggggacacgattatcttcgaggcaaacggaaacctcatagcgccgatgtacgccttcgccctgagccgtggccaccatcatcaccaccattaatag

SEQ ID NO: 127 - DNA, 2151 bp, Artificial Sequence
  ngSTF2.HA1-3mut
atgaaattcttagtcaacgttgcccttgtttttatggtcgtatacatttcttacatctatgcggcccaagtgatcaacaccaactccctgtccctgctcactcaaaacaacctccagaaatctcagtctgctctcggtactgctatcgagcgtctctcctccggcctgaggatcaactccgctaaagatgacgccgccggacaagctatcgctaaccgctttactgccaacattaaaggcctgacccaagcctctaggaacgccaatgatggcatttctatcgctcaaaccaccgaaggcgccctgaacgaaatcaataataacctgcaacgtgtccgcgaactcgccgtccagtccgcccaatctaccaactctcagtctgacctggactctatccaagctgagatcacccaaaggctcaacgagatcgatcgtgtgtctggtcaaactcagtttaacggcgtcaaagtgctggctcaagacaacacactcaccatccaagtaggagccaatgacggcgagacaatcgatatcgacctgaagcagatcaattctcaaactctgggcctggactccctgaacgtccaaaaggcttacgacgtgaaggacaccgctgtgacaaccaaagcctatgctaatcaaggaacaaccctggacgtgtccggactcgatgacgccgctatcaaggccgctactggcggcactcagggaactgcctctgtgaccggaggcgctgtgaagttcgacgccgataacaacaaatacttcgtcactattggtggtttcactggcgctgacgccgctaagaacggtgactacgaggtcaacgtcgccactgacggaacagtgacactggccgctggcgctaccaagaccacaatgcctgctggtgctactactaagacagaggtgcaggaactcaaggacacccctgccgtggtgtccgccgatgctaagaacgctctcattgctggtggtgtcgacgctacggacgccaacggagccgagcttgtgaaaatgtcctacaccgacaagaacggaaagactatcgagggaggttacgctctgaaggctggcgataagtactacgccgctgattatgacgaagctacaggcgccattaaagctaaaaccacatcttataccgctgccgatggtactaccaagactgctgccaatcagctgggtggagtcgatggaaaaaccgaagtggtcacaatcgacggaaagacctatcaagcctccaaggctgctggccacgacttcaaggcccaacccgaactggccgaggctgctgctaaaaccactgaaaaccccctgcagaaaattgacgctgccctggcccaagtggatgccctccgctccgacctcggcgctgtgcaaaaccgcttcaactccgctattacaaacctcggcaataccgtcaatcagctctctgaagctaggtctcgtattgaggattccgattacgctaccgaggtctcccagatgtcccgtgcccaaattctccaacaagccggcacctccgtcctcgcccaagccaatcaggtgccacagaatgtgctgagcctgctggcttctggatctggatctggttctaactccgagaacgaaatctgttacccgggcgacttcattgacaaagaggagctccgcgaacagctgtcttctgtctcttctttcgaacgtttcgaaattttcccaaaggaatcctcctggccaaaccataacaccaacggagtgaccgccgcctgtagccatgagggcaagtcttctttctaccgtaatctgctgtggctgactgaaaaagagggttcttatcccaaactgaagaactcttatgtcaacaagaagggcaaagaggtcctggtgctgtggggtatccaccacccccccaactccaaggagcagcagaatctgtaccaaaacgaaaatgcttacgtgtctgtcgtgacatctaactacaaccggcgcttcacgcccgaaatcgccgagcgtcccaaagtgcgcgatcaggccggaaggatgaactactactggaccctgctcaaacccggagataccatcatattcgaagccaatggcaatctcatcgctcccatgtatgctgctgctctctctcgcggacaccaccaccaccaccactaatag

SEQ ID NO: 128 - DNA, 552 bp, Artificial Sequence; identical to SEQ ID NO: 116
  ngHA1-3mut

SEQ ID NO: 129 - DNA, 2439 bp, Artificial Sequence
  wtSTF2.HA1-1ng
atgaaattcttagtcaacgttgcccttgtttttatggtcgtatacatttcttacatctatgcggcccaggttatcaataccaactccctgtcgttgctcacccaaaataaccttaataaaagccagagcgcactgggaaccgccatagaacgcctctcaagcggcctccggatcaattctgcaaaagacgacgccgccggtcaggccatcgcaaaccgctttaccgccaatatcaagggactgacgcaggcttcgaggaatgctaacgatggaataagcatcgctcaaaccacggagggcgccctgaacgagatcaacaacaacctacagcgcgtcagggagctcgcagtgcagtccgccaattcgaccaactcgcagtcggacctggactcgatccaagccgaaatcacccagcgcctgaatgagattgaccgggtgagcggtcagacacagtttaacggcgtgaaggtacttgcacaggataacacacttacgatacaggtgggcgccaacgatggtgaaaccatagacattgatctcaaacagattaacagccagacgctcgggttggatagcctgaatgtgcaaaaggcgtacgacgtgaaagacacggcggtcactaccaaagcctacgctaacaatggcactaccttggatgtgagcggattggatgatgcagcaatcaaggctgctaccggcggtacgaacggaaccgcgtccgtgaccggcggtgccgtgaagttcgatgctgacaacaataagtatttcgtcaccattggaggctttactggcgccgacgcagcaaagaacggcgactatgaagtgaacgtggcaaccgatggaaccgtgacgctggccgctggtgccaccaagaccaccatgccagccggcgccacaactaagaccgaggtgcaggagttaaaggacacccccgcggtggttagcgcagatgccaaaaacgccttgatcgccggcggagtggatgcaactgatgctaatggtgcggagctggttaaaatgtcgtatacagacaagaatggtaagacgatcgagggcggttatgcccttaaggcaggagataagtattacgctgctgattacgatgaggcgacgggagctattaaggccaagacaacgtcatacacggcggcggacggaacgactaagacggctgccaatcagttgggaggggttgacgggaagacagaggtcgttacgatcgatggcaagacatacaacgcttccaaggccgctggccacgatttcaaagctcaacccgaactggccgaggccgcggcgaaaacaactgagaacccgttgcagaagattgatgcggccctggcgcaagtagatgccctgcgctcagacctgggcgccgttcaaaatcgattcaattccgcgattacaaacctgggcaatacagtaaacaatctatccgaggccagatcccgcattgaagactccgactacgcgacagaagtaagtaacatgagtcgtgcccagattctgcagcaggccggcactagtgtcctggcccaggccaatcaagtcccgcagaatgtgctgagcctactagcatctggatctggatctggttcttcccataatggcaaattgtgtcggctgaaaggcatcgcccctctgcaactcggcaagtgcaatattgcggggtggctgttgggcaacccagaatgtgaccccctcctgcccgtccgttcttggtcttacatcgtggaaacacctaactccgagaacggcatctgttacccgggcgacttcattgactacgaggagctccgcgaacagctgtcttctgtctcttctttcgaacgtttcgaaattttcccaaaggaatcctcctggccaaaccataacaccaacggagtgaccgccgcctgtagccatgagggcaagtcttctttctaccgtaatctgctgtggctgactgaaaaagagggttcttatcccaaactgaagaactcttatgtcaacaagaagggcaaagaggtcctggtgctgtggggtatccaccacccccccaactccaaggagcagcagaatctgtaccaaaacgaaaatgcttacgtgtctgtcgtgacatctaactacaaccggcgcttcacgcccgaaatcgccgagcgtcccaaagtgcgcgatcaggccggaaggatgaactactactggaccctgctcaaacccggagataccatcatattcgaagccaatggcaatctcatcgctcccatgtatgctttcgctctctctcgcggattcggttccggcataatcactagccaagcctccatgcacgagtgcaataccaagtgtcaaactccactgggagccattcaaagctccctgccctaccaaaacatccatcctgtgaccattggagagtgccctaaatacgtgcgccaccaccaccaccaccactaatag

SEQ ID NO: 130 - DNA, 840 bp, Artificial Sequence; identical to SEQ ID NO: 120
  ngHA1-1

SEQ ID NO: 131 - DNA, 2439 bp, Artificial Sequence
  ngSTF2.HA1-1wt
atgaaattcttagtcaacgttgcccttgtttttatggtcgtatacatttcttacatctatgcggcccaagtgatcaacaccaactccctgtccctgctcactcaaaacaacctccagaaatctcagtctgctctcggtactgctatcgagcgtctctcctccggcctgaggatcaactccgctaaagatgacgccgccggacaagctatcgctaaccgctttactgccaacattaaaggcctgacccaagcctctaggaacgccaatgatggcatttctatcgctcaaaccaccgaaggcgccctgaacgaaatcaataataacctgcaacgtgtccgcgaactcgccgtccagtccgcccaatctaccaactctcagtctgacctggactctatccaagctgagatcacccaaaggctcaacgagatcgatcgtgtgtctggtcaaactcagtttaacggcgtcaaagtgctggctcaagacaacacactcaccatccaagtaggagccaatgacggcgagacaatcgatatcgacctgaagcagatcaattctcaaactctgggcctggactccctgaacgtccaaaaggcttacgacgtgaaggacaccgctgtgacaaccaaagcctatgctaatcaaggaacaaccctggacgtgtccggactcgatgacgccgctatcaaggccgctactggcggcactcagggaactgcctctgtgaccggaggcgctgtgaagttcgacgccgataacaacaaatacttcgtcactattggtggtttcactggcgctgacgccgctaagaacggtgactacgaggtcaacgtcgccactgacggaacagtgacactggccgctggcgctaccaagaccacaatgcctgctggtgctactactaagacagaggtgcaggaactcaaggacacccctgccgtggtgtccgccgatgctaagaacgctctcattgctggtggtgtcgacgctacggacgccaacggagccgagcttgtgaaaatgtcctacaccgacaagaacggaaagactatcgagggaggttacgctctgaaggctggcgataagtactacgccgctgattatgacgaagctacaggcgccattaaagctaaaaccacatcttataccgctgccgatggtactaccaagactgctgccaatcagctgggtggagtcgatggaaaaaccgaagtggtcacaatcgacggaaagacctatcaagcctccaaggctgctggccacgacttcaaggcccaacccgaactggccgaggctgctgctaaaaccactgaaaaccccctgcagaaaattgacgctgccctggcccaagtggatgccctccgctccgacctcggcgctgtgcaaaaccgcttcaactccgctattacaaacctcggcaataccgtcaatcagctctctgaagctaggtctcgtattgaggattccgattacgctaccgaggtctcccagatgtcccgtgcccaaattctccaacaagccggcacctccgtcctcgcccaagccaatcaggtgccacagaatgtgctgagcctactagcatcaggttccggctcaggttccagccacaacggaaagctgtgccgtctgaaaggcatagcgccactgcagctcggcaaatgtaacatcgcaggttggctccttggtaacccggagtgcgaccccctcctccctgtacgatcctggagttatatcgtggagacccccaatagcgagaacggaatttgctacccaggagatttcatagactacgaggagttgcgcgagcagctttcgtctgtgagcagcttcgagaggttcgaaatcttcccgaaggagagcagctggccgaatcataacactaacggtgtgacagccgcctgcagtcatgaaggaaagagttcattctatcgcaacctgctgtggttgacggagaaagagggcagctaccctaagttgaagaactcctatgtgaacaaaaaaggcaaggaggttctggtgctgtggggcatacaccacccccccaatagcaaggagcagcagaatctgtaccaaaacgagaatgcctatgtgagcgtggtcactagtaactataaccgtcggttcactcccgagatcgccgagcgtccgaaggtgagggaccaggcaggccggatgaactactactggaccctattgaagccaggggacacgattatcttcgaggcaaacggaaacctcatagcgccgatgtacgcgttcgccctgagccgcggctttggatcggggatcatcacgtctaacgcctcgatgcacgaatgtaataccaaatgccagaccccactgggtgctatcaactcgtccttaccctatcaaaatatacatccggtcaccataggcgagtgtcccaaatatgtcagacaccatcatcaccaccattaatag

SEQ ID NO: 132 - DNA, 840 bp, Artificial Sequence
  HA1-1 PR8
agccacaacggaaagctgtgccgtctgaaaggcatagcgccactgcagctcggcaaatgtaacatcgcaggttggctccttggtaacccggagtgcgaccccctcctccctgtacgatcctggagttatatcgtggagacccccaatagcgagaacggaatttgctacccaggagatttcatagactacgaggagttgcgcgagcagctttcgtctgtgagcagcttcgaaaggttcgagatattcccgaaggagagcagctggccgaatcataacactaacggtgtgacagccgcctgcagtcatgaaggaaagagttcattctatcgcaacctgctgtggttgacggagaaagagggcagctaccctaagttgaagaactcctatgtgaacaaaaaaggcaaggaggttctggtgctgtggggcatacaccacccccccaatagcaaggagcagcagaatctgtaccaaaacgagaatgcctatgtgagcgtggtcactagtaactataaccgtcggttcactcccgagatcgccgagcgtccgaaggtgagggaccaggcaggccggatgaactactactggaccctattgaagccaggggacacgattatcttcgaggcaaacggaaacctcatagcgccgatgtacgccttcgccctgagccgtggctttggatcggggatcatcacgtctaacgcctcgatgcacgaatgtaataccaaatgccagaccccactgggtgctatcaactcgtccttaccctatcaaaatatacatccggtcaccataggcgagtgtcccaaatatgtcagacaccatcatcaccaccattaatag

SEQ ID NO: 133 - DNA, 903 bp, Artificial Sequence
  HA1-1 PR8
atgaaattcttagtcaacgttgcccttgtttttatggtcgtatacatttcttacatctatgcgagccacaacggaaagctgtgccgtctgaaaggcatagcgccactgcagctcggcaaatgtaacatcgcaggttggctccttggtaacccggagtgcgaccccctcctccctgtacgatcctggagttatatcgtggagacccccaatagcgagaacggaatttgctacccaggagatttcatagactacgaggagttgcgcgagcagctttcgtctgtgagcagcttcgaaaggttcgagatattcccgaaggagagcagctggccgaatcataacactaacggtgtgacagccgcctgcagtcatgaaggaaagagttcattctatcgcaacctgctgtggttgacggagaaagagggcagctaccctaagttgaagaactcctatgtgaacaaaaaaggcaaggaggttctggtgctgtggggcatacaccacccccccaatagcaaggagcagcagaatctgtaccaaaacgagaatgcctatgtgagcgtggtcactagtaactataaccgtcggttcactcccgagatcgccgagcgtccgaaggtgagggaccaggcaggccggatgaactactactggaccctattgaagccaggggacacgattatcttcgaggcaaacggaaacctcatagcgccgatgtacgccttcgccctgagccgtggctttggatcggggatcatcacgtctaacgcctcgatgcacgaatgtaataccaaatgccagaccccactgggtgctatcaactcgtccttaccctatcaaaatatacatccggtcaccataggcgagtgtcccaaatatgtcagacaccatcatcaccaccattaatag

SEQ ID NO: 134 - DNA, 105 bp, Artificial Sequence
  FOR PRIMER
aggcagatctatgaaattcttagtcaacgttgcccttgtttttatggtcgtatacatttcttacatctatgcgagccacaacggaaagctgtgccgtctgaaagg

SEQ ID NO: 135 - DNA, 55 bp, Artificial Sequence
  REV PRIMER
acctgcatgcctattaatggtggtgatgatggtgtctgacatatttgggacactc

SEQ ID NO: 136 - DNA, 1620 bp, Artificial Sequence
  HA0s PR8
atgaaattcttagtcaacgttgcccttgtttttatggtcgtatacatttcttacatctatgcggacaccatttgcattggataccatgcaaacaactcaaccgatactgttgataccgtccttgagaagaacgttaccgtcacgcactcggtcaacctattagaggatagccacaacggaaagctgtgccgtctgaaaggcatagcgccactgcagctcggcaaatgtaacatcgcaggttggctccttggtaacccggagtgcgaccccctcctccctgtacgatcctggagttatatcgtggagacccccaatagcgagaacggaatttgctacccaggagatttcatagactacgaggagttgcgcgagcagctttcgtctgtgagcagcttcgaaaggttcgagatattcccgaaggagagcagctggccgaatcataacactaacggtgtgacagccgcctgcagtcatgaaggaaagagttcattctatcgcaacctgctgtggttgacggagaaagagggcagctaccctaagttgaagaactcctatgtgaacaaaaaaggcaaggaggttctggtgctgtggggcatacaccacccccccaatagcaaggagcagcagaatctgtaccaaaacgagaatgcctatgtgagcgtggtcactagtaactataaccgtcggttcactcccgagatcgccgagcgtccgaaggtgagggaccaggcaggccggatgaactactactggaccctattgaagccaggggacacgattatcttcgaggcaaacggaaacctcatagcgccgatgtacgccttcgccctgagccgtggctttggatcggggatcatcacgtctaacgcctcgatgcacgaatgtaataccaaatgccagaccccactgggtgctatcaactcgtccttaccctatcaaaatatacatccggtcaccataggcgagtgtcccaaatatgtcagatccgccaagttgcggatggtgaccggcctccgcaatattcctagtattcagtcacgcggcttgttcggcgccatcgctggtttcatcgaaggcgggtggacaggcatgattgatggctggtatggctatcaccaccagaacgagcagggctcgggctacgcggctgaccagaagtcgactcagaatgccatcaatggcatcacgaataaggtgaacacggtcattgaaaagatgaacattcaatttacagccgtaggaaaagagtttaataaactggaaaaaagaatggagaatctgaataagaaggtggacgacggatttttggacatctggacgtacaacgccgagctgctggttctgctggaaaatgagcgaacactggattttcatgattctaacgtaaagaatctgtacgagaaggtgaagtcccaactaaagaataatgccaaggaaatcggaaatggatgctttgagttttaccacaagtgcgataatgagtgcatggaatccgtgcgaaatggtacatacgattacccaaagtactccgaagaatccaagctaaatcgcgaaaaggttgatggtgttaaacttgaatccatgggtatttaccaacaccatcatcaccaccattaatag

SEQ ID NO: 137 - DNA, 885 bp, Artificial Sequence
  HA1-1 PR8 (no his tag)
atgaaattcttagtcaacgttgcccttgtttttatggtcgtatacatttcttacatctatgcgagccacaacggaaagctgtgccgtctgaaaggcatagcgccactgcagctcggcaaatgtaacatcgcaggttggctccttggtaacccggagtgcgaccccctcctccctgtacgatcctggagttatatcgtggagacccccaatagcgagaacggaatttgctacccaggagatttcatagactacgaggagttgcgcgagcagctttcgtctgtgagcagcttcgaaaggttcgagatattcccgaaggagagcagctggccgaatcataacactaacggtgtgacagccgcctgcagtcatgaaggaaagagttcattctatcgcaacctgctgtggttgacggagaaagagggcagctaccctaagttgaagaactcctatgtgaacaaaaaaggcaaggaggttctggtgctgtggggcatacaccacccccccaatagcaaggagcagcagaatctgtaccaaaacgagaatgcctatgtgagcgtggtcactagtaactataaccgtcggttcactcccgagatcgccgagcgtccgaaggtgagggaccaggcaggccggatgaactactactggaccctattgaagccaggggacacgattatcttcgaggcaaacggaaacctcatagcgccgatgtacgccttcgccctgagccgtggctttggatcggggatcatcacgtctaacgcctcgatgcacgaatgtaataccaaatgccagaccccactgggtgctatcaactcgtccttaccctatcaaaatatacatccggtcaccataggcgagtgtcccaaatatgtcagataatag

SEQ ID NO: 138 - DNA, 45 bp, Artificial Sequence
  REV PRIMER
acctgcatgcctattatctgacatatttgggacactcgcctatgg

SEQ ID NO: 139 - DNA, 903 bp, Artificial Sequence
  HA1-1 NC
atgaaattcttagtcaacgttgcccttgtttttatggtcgtatacatttcttacatctatgcgagccacaatggtaagctgtgtctgttgaagggaattgcacccctccaactgggcaactgttcggtcgctggttggatcctcggaaacccagaatgcgagctccttatcagtaaggaatcttggtcttatattgtcgaaaccccgaaccccgagaacggaacatgctacccgggttactttgctgattacgaagagcttcgcgagcaactcagctccgtatcctccttcgagcgcttcgagatttttcccaaagagtccagctggccaaatcataccgtcaccggcgtgtcggcctcctgttcccacaacggaaagtctagcttctatagaaatcttctctggctgacgggtaagaatggtctttaccccaatttgagcaagtcctacgtcaacaacaaagaaaaggaagttctggtattgtggggtgtgcaccaccctccgaacatcggcaatcagcgcgccctgtatcacacagagaacgcgtatgtttccgttgtctcctcacattactcgaggcgcttcactcctgaaatagctaagcgtccgaaagtgcgtgaccaggagggacgtatcaactattattggacgctgttggagccaggcgatacaattatcttcgaggctaacggtaaccttatcgctccctggtacgccttcgccctgtcgcgtggtttcggtagtggaataatcactagtaatgctcctatggacgagtgtgacgctaagtgccaaacacctcagggcgctatcaatagctcccttccattccagaacgtccatccggttaccattggagagtgtccaaagtacgtgagacaccatcatcaccatcactaatag

SEQ ID NO: 140 - DNA, 103 bp, Artificial Sequence
  FOR PRIMER
aggcagatctatgaaattcttagtcaacgttgcccttgtttttatggtcgtatacatttcttacatctatgcgagccacaatggtaagctgtgtctgttgaag

SEQ ID NO: 141 - DNA, 63 bp, Artificial Sequence
  REV PRIMER
agtcgcatgcctattaatggtggtgatgatggtgtctcacgtactttggacactctccaatgg

SEQ ID NO: 142 - DNA, 1632 bp, Artificial Sequence
  HA0s NC
agatctatgaagtttctcgtgaacgttgcactggtgtttatggtagtctatatatcgtacatttatgctgacacgatttgcatcggttaccatgcgaacaactccacggataccgtggacacagtgttggaaaagaacgtgaccgtcacgcactccgtaaaccttctggaggacagccacaatggtaagctgtgtctgttgaagggaattgcacccctccaactgggcaactgttcggtcgctggttggatcctcggaaacccagaatgcgagctccttatcagtaaggaatcttggtcttatattgtcgaaaccccgaaccccgagaacggaacatgctacccgggttactttgctgattacgaagagcttcgcgagcaactcagctccgtatcctccttcgagcgcttcgagatttttcccaaagagtccagctggccaaatcataccgtcaccggcgtgtcggcctcctgttcccacaacggaaagtctagcttctatagaaatcttctctggctgacgggtaagaatggtctttaccccaatttgagcaagtcctacgtcaacaacaaagaaaaggaagttctggtattgtggggtgtgcaccaccctccgaacatcggcaatcagcgcgccctgtatcacacagagaacgcgtatgtttccgttgtctcctcacattactcgaggcgcttcactcctgaaatagctaagcgtccgaaagtgcgtgaccaggagggacgtatcaactattattggacgctgttggagccaggcgatacaattatcttcgaggctaacggtaaccttatcgctccctggtacgccttcgccctgtcgcgtggtttcggtagtggaataatcactagtaatgctcctatggacgagtgtgacgctaagtgccaaacacctcagggcgctatcaatagctcccttccattccagaacgtccatccggttaccattggagagtgtccaaagtacgtgagatcggccaaacttcgcatggtcacgggtctgcgcaacatcccgtcaatccaatctaggggcctcttcggcgctatcgccggtttcattgagggcggttggactggaatggttgacggatggtacggctatcatcaccagaacgaacaaggttccggttacgctgctgaccagaaatctactcagaacgcgatcaatggtatcacgaacaaggtgaacagcgtcattgaaaagatgaatactcagtttacagccgtgggcaaagagttcaataaactcgagagacgtatggaaaacctcaataagaaggtggatgacggcttcctggacatttggacttacaacgccgagctgctggtcctgctcgagaacgagagaacccttgacttccacgacagcaacgtcaagaacctgtacgagaaggtgaaaagtcaacttaaaaacaatgccaaggagattggtaacggctgcttcgaattctaccacaagtgtaataatgagtgcatggaatccgttaagaacggcacctacgattaccctaaatactcagaggagtccaagcttaaccgcgagaagatcgacggcgtaaaactggaaagcatgggcgtataccaacaccatcatcaccatcactaataggcatgc

SEQ ID NO: 143 - DNA, 909 bp, Artificial Sequence
  HA1-1 VN
atgaaattcttagtcaacgttgcccttgtttttatggtcgtatacatttcttacatctatgcggagaagaaacacaacggtaagctttgcgacttggatggagtcaagcccctcatacttagagattgtagtgtagccggttggctgctcggtaacccaatgtgcgatgagttcatcaatgttcccgaatggtcatatatcgtcgaaaaagctaatcctgtcaacgacctgtgctaccccggtgatttcaatgactatgaagaactgaagcacctgctctcccgcatcaaccatttcgagaaaatccagatcattcccaagagttcctggtctagccatgaggctagtctgggtgtctcatccgcctgcccatatcagggtaaaagttctttctttaggaacgtagtatggttgataaagaaaaactctacatacccgaccatcaagcgctcttacaacaatacgaaccaagaggatctgcttgtcctttggggaatccatcatcctaatgatgctgccgaacagactaagctctaccaaaaccctaccacttatatttccgtcggcacctctactctgaaccagcgccttgtgcccaggatcgctacgagatcaaaagtcaacggccaatcgggccgcatggaattcttctggacgatcctgaagcctaatgacgctatcaacttcgagtcaaatggaaactttatcgctcccgagtacgcttacaagatcgtcaagaagggcgactccacgattatgaagtcagagttggagtacggcaactgcaacacaaagtgccaaactcctatgggcgctataaattcttcaatgccgttccacaacatccatccgctcacgatcggtgagtgcccgaaatatgtaaagcaccatcaccaccatcactaatag

SEQ ID NO: 144 - DNA, 99 bp, Artificial Sequence
  FOR PRIMER
aggcagatctatgaaattcttagtcaacgttgcccttgtttttatggtcgtatacatttcttacatctatgcggagaagaaacacaacggtaagctttg

SEQ ID NO: 145 - DNA, 58 bp, Artificial Sequence
  REV PRIMER
agtcgcatgcctattatggtggtgatgatggtgctttacatatttcgggcactcaccg

SEQ ID NO: 146 - DNA, 1644 bp, Artificial Sequence
  HA0s VN
agatctatgaaattcttggttaatgtagccctggtgtttatggtagtgtacatttcatacatttatgctgatcaaatctgcattggctaccatgccaacaacagcaccgagcaagttgacacgatcatggagaagaacgtaaccgtcactcacgctcaagacatcctggagaagaaacacaacggtaagctttgcgacttggatggagtcaagcccctcatacttagagattgtagtgtagccggttggctgctcggtaacccaatgtgcgatgagttcatcaatgttcccgaatggtcatatatcgtcgaaaaagctaatcctgtcaacgacctgtgctaccccggtgatttcaatgactatgaagaactgaagcacctgctctcccgcatcaaccatttcgagaaaatccagatcattcccaagagttcctggtctagccatgaggctagtctgggtgtctcatccgcctgcccatatcagggtaaaagttctttctttaggaacgtagtatggttgataaagaaaaactctacatacccgaccatcaagcgctcttacaacaatacgaaccaagaggatctgcttgtcctttggggaatccatcatcctaatgatgctgccgaacagactaagctctaccaaaaccctaccacttatatttccgtcggcacctctactctgaaccagcgccttgtgcccaggatcgctacgagatcaaaagtcaacggccaatcgggccgcatggaattcttctggacgatcctgaagcctaatgacgctatcaacttcgagtcaaatggaaactttatcgctcccgagtacgcttacaagatcgtcaagaagggcgactccacgattatgaagtcagagttggagtacggcaactgcaacacaaagtgccaaactcctatgggcgctataaattcttcaatgccgttccacaacatccatccgctcacgatcggtgagtgcccgaaatatgtaaagtcgaatcgtctcgtactggcgacaggcctgagaaatagtccgcaacgtgaacgtcgtcgcaagaagagaggactgtttggtgccattgcaggctttattgagggcggctggcagggcatggttgacggatggtacggctaccaccattcaaacgagcagggatctggctacgccgctgacaaagaaagcacccaaaaggccattgatggagtgacgaataaggtgaattcgatcatcgacaaaatgaacacgcaattcgaagcagtgggtcgcgaattcaataacctggagcgccgtatcgagaatctgaacaagaagatggaagacggctttttggatgtctggacatataacgctgaattgctggtcctcatggaaaacgagcgtacccttgatttccacgacagcaacgttaagaacctctacgacaaggtcaggctccagctcagggataacgccaaggaattgggaaacggatgcttcgagttctaccacaaatgcgacaacgagtgcatggagtcagtcaggaatggtacctacgactacccgcaatattctgaggaggctcgcttgaagcgtgaggaaatatcgggtgttaaattggagagtattggaatctaccagcaccatcaccaccatcactaataggcatgc

SEQ ID NO: 147 - DNA, 909 bp, Artificial Sequence
  HA1-1 IND
atgaaattcttagtcaacgttgcccttgtttttatggtcgtatacatttcttacatctatgcggagaaaacccataacggtaagttgtgcgaccttgacggtgtaaagcccctgatcctccgtgactgcagtgttgctggttggcttttgggcaaccccatgtgtgacgaatttatcaacgtgcctgaatggtcatacattgtagagaaggccaaccccacgaacgatctctgttatcccggcagcttcaatgactatgaggaacttaagcaccttctgtcacgtatcaaccacttcgaaaagatccagatcatcccgaagagctcctggagcgaccacgaagccagttcgggtgtgtcttccgcttgcccctacctcggtagcccttccttcttccgtaacgtagtgtggctgatcaagaagaatagcacttaccctacaatcaaaaagtcgtataacaatactaaccaagaggatctgcttgtactctggggaattcatcatcccaacgacgcggcggagcagaccaggttgtaccagaaccccaccacttacatctccatcggtacgtccacactgaatcagcgtctggtccccaagatcgcaaccaggtccaaggttaacggtcagtccggtcgtatggagttcttctggaccatcctgaagcccaacgacgccatcaacttcgagtccaacggtaatttcattgctccggagtacgcctacaagatagttaagaagggtgattcagcgatcatgaagtcggaacttgagtatggcaactgcaacactaaatgccaaactccaatgggcgctatcaactccagtatgccattccataacatccacccattgacaatcggtgaatgtcccaagtacgtgaagcaccaccatcaccatcactaatag

SEQ ID NO: 148 - DNA, 99 bp, Artificial Sequence
  FOR PRIMER
aggcagatctatgaaattcttagtcaacgttgcccttgtttttatggtcgtatacatttcttacatctatgcggagaaaacccataacggtaagttgtg

SEQ ID NO: 149 - DNA, 63 bp, Artificial Sequence
  REV PRIMER
agtcgcatgcctattaatggtggtgatgatggtgcttcacgtacttgggacattcaccgattg

SEQ ID NO: 150 - DNA, 1644 bp, Artificial Sequence
  HA0s IND
agatctatgaagttcctggtcaatgtagccttggtatttatggtagtctatatctcgtacatttacgcagaccagatttgtattggatatcacgctaacaacagcacagagcaggtagatactattatggagaaaaatgttaccgtcactcacgcccaggacatcctggagaaaacccataacggtaagttgtgcgaccttgacggtgtaaagcccctgatcctccgtgactgcagtgttgctggttggcttttgggcaaccccatgtgtgacgaatttatcaacgtgcctgaatggtcatacattgtagagaaggccaaccccacgaacgatctctgttatcccggcagcttcaatgactatgaggaacttaagcaccttctgtcacgtatcaaccacttcgaaaagatccagatcatcccgaagagctcctggagcgaccacgaagccagttcgggtgtgtcttccgcttgcccctacctcggtagcccttccttcttccgtaacgtagtgtggctgatcaagaagaatagcacttaccctacaatcaaaaagtcgtataacaatactaaccaagaggatctgcttgtactctggggaattcatcatcccaacgacgcggcggagcagaccaggttgtaccagaaccccaccacttacatctccatcggtacgtccacactgaatcagcgtctggtccccaagatcgcaaccaggtccaaggttaacggtcagtccggtcgtatggagttcttctggaccatcctgaagcccaacgacgccatcaacttcgagtccaacggtaatttcattgctccggagtacgcctacaagatagttaagaagggtgattcagcgatcatgaagtcggaacttgagtatggcaactgcaacactaaatgccaaactccaatgggcgctatcaactccagtatgccattccataacatccacccattgacaatcggtgaatgtcccaagtacgtgaagagcaacaggttggtattggccaccggtttgagaaacagcccccagagagagtcgcgtcgtaaaaagcgcggcttgttcggagccatcgctggcttcatagagggtggttggcagggaatggtcgatggttggtatggttatcatcattccaacgagcagggaagtggttacgccgccgacaaagaatcgacccagaaggctattgacggcgtcacaaacaaagtaaactctatcattgataagatgaacacccagttcgaggctgtaggtagagaattcaacaacctcgaaagacgtattgagaacctgaacaagaaaatggaggatggcttcctggacgtgtggacctacaatgctgagctgttggtccttatggagaacgagcgtaccctcgatttccatgactcaaacgtgaagaacctgtatgacaaggtgcgtttgcaactgagggacaacgcaaaggagcttggaaacggttgtttcgaattttatcataagtgcgacaatgagtgtatggagtcgattagaaatggcacgtacaactaccctcaatacagcgaagaagctcgtctcaaacgtgaggaaatcagcggcgtcaagctcgaatcaatcggtacctatcagcaccaccatcaccatcactaataggcatgc

SEQ ID NO: 151 - protein, 811 aa, Artificial Sequence
  STF2.HA1-1His (PR8)
MKFLVNVALVFMVVYISYIYAAQVINTNSLSLLTQNNLNKSQSALGTAIERLSSGLRINSAKDDAAGQAIANRFTANIKGLTQASRNANDGISIAQTTEGALNEINNNLQRVRELAVQSANSTNSQSDLDSIQAEITQRLNEIDRVSGQTQFNGVKVLAQDNTLTIQVGANDGETIDIDLKQINSQTLGLDSLNVQKAYDVKDTAVTTKAYANNGTTLDVSGLDDAAIKAATGGTNGTASVTGGAVKFDADNNKYFVTIGGFTGADAAKNGDYEVNVATDGTVTLAAGATKTTMPAGATTKTEVQELKDTPAVVSADAKNALIAGGVDATDANGAELVKMSYTDKNGKTIEGGYALKAGDKYYAADYDEATGAIKAKTTSYTAADGTTKTAANQLGGVDGKTEVVTIDGKTYNASKAAGHDFKAQPELAEAAAKTTENPLQKIDAALAQVDALRSDLGAVQNRFNSAITNLGNTVNNLSEARSRIEDSDYATEVSNMSRAQILQQAGTSVLAQANQVPQNVLSLLASGSGSGSSHNGKLCRLKGIAPLQLGKCNIAGWLLGNPECDPLLPVRSWSYIVETPNSENGICYPGDFIDYEELREQLSSVSSFERFEIFPKESSWPNHNTNGVTAACSHEGKSSFYRNLLWLTEKEGSYPKLKNSYVNKKGKEVLVLWGIHHPPNSKEQQNLYQNENAYVSVVTSNYNRRFTPEIAERPKVRDQAGRMNYYWTLLKPGDTIIFEANGNLIAPMYAFALSRGFGSGIITSNASMHECNTKCQTPLGAINSSLPYQNIHPVTIGECPKYVRHHHHHH

SEQ ID NO: 152 - protein, 811 aa, Artificial Sequence
  ngSTF2.HA1-1His (PR8)
MKFLVNVALVFMVVYISYIYAAQVINTNSLSLLTQNNLQKSQSALGTAIERLSSGLRINSAKDDAAGQAIANRFTANIKGLTQASRNANDGISIAQTTEGALNEINNNLQRVRELAVQSAQSTNSQSDLDSIQAEITQRLNEIDRVSGQTQFNGVKVLAQDNTLTIQVGANDGETIDIDLKQINSQTLGLDSLNVQKAYDVKDTAVTTKAYANQGTTLDVSGLDDAAIKAATGGTQGTASVTGGAVKFDADNNKYFVTIGGFTGADAAKNGDYEVNVATDGTVTLAAGATKTTMPAGATTKTEVQELKDTPAVVSADAKNALIAGGVDATDANGAELVKMSYTDKNGKTIEGGYALKAGDKYYAADYDEATGAIKAKTTSYTAADGTTKTAANQLGGVDGKTEVVTIDGKTYQASKAAGHDFKAQPELAEAAAKTTENPLQKIDAALAQVDALRSDLGAVQNRFNSAITNLGNTVNQLSEARSRIEDSDYATEVSQMSRAQILQQAGTSVLAQANQVPQNVLSLLASGSGSGSSHNGKLCRLKGIAPLQLGKCNIAGWLLGNPECDPLLPVRSWSYIVETPNSENGICYPGDFIDYEELREQLSSVSSFERFEIFPKESSWPNHNTNGVTAACSHEGKSSFYRNLLWLTEKEGSYPKLKNSYVNKKGKEVLVLWGIHHPPNSKEQQNLYQNENAYVSVVTSNYNRRFTPEIAERPKVRDQAGRMNYYWTLLKPGDTIIFEANGNLIAPMYAFALSRGFGSGIITSQASMHECNTKCQTPLGAIQSSLPYQNIHPVTIGECPKYVRHHHHHH

SEQ ID NO: 153 - protein, 761 aa, Artificial Sequence
  STF2.HA1-2His (PR8)
MKFLVNVALVFMVVYISYIYAAQVINTNSLSLLTQNNLNKSQSALGTAIERLSSGLRINSAKDDAAGQAIANRFTANIKGLTQASRNANDGISIAQTTEGALNEINNNLQRVRELAVQSANSTNSQSDLDSIQAEITQRLNEIDRVSGQTQFNGVKVLAQDNTLTIQVGANDGETIDIDLKQINSQTLGLDSLNVQKAYDVKDTAVTTKAYANNGTTLDVSGLDDAAIKAATGGTNGTASVTGGAVKFDADNNKYFVTIGGFTGADAAKNGDYEVNVATDGTVTLAAGATKTTMPAGATTKTEVQELKDTPAVVSADAKNALIAGGVDATDANGAELVKMSYTDKNGKTIEGGYALKAGDKYYAADYDEATGAIKAKTTSYTAADGTTKTAANQLGGVDGKTEVVTIDGKTYNASKAAGHDFKAQPELAEAAAKTTENPLQKIDAALAQVDALRSDLGAVQNRFNSAITNLGNTVNNLSEARSRIEDSDYATEVSNMSRAQILQQAGTSVLAQANQVPQNVLSLLASGSGSGSKGIAPQLGKCNIAGWLLGNPECDPLLPVRSWSYIVETPNSENGICYPGDFIDYEELREQLSSVSSFERFEIFPKESSWPNHNTNGVTAACSHEGKSSFYRNLLWLTEKEGSYPKLKNSYVNKKGKEVLVLWGIHHPPNSKEQQNLYQNENAYVSVVTSNYNRRFTPEIAERPKVRDQAGRMNYYWTLLKPGDTIIFEANGNLIAPMYAFALSRGFGSGIITSHHHHHH

SEQ ID NO: 154 - protein, 762 aa, Artificial Sequence
  ngSTF2.HA1-2His (PR8)
MKFLVNVALVFMVVYISYIYAAQVINTNSLSLLTQNNLQKSQSALGTAIERLSSGLRINSAKDDAAGQAIANRFTANIKGLTQASRNANDGISIAQTTEGALNEINNNLQRVRELAVQSAQSTNSQSDLDSIQAEITQRLNEIDRVSGQTQFNGVKVLAQDNTLTIQVGANDGETIDIDLKQINSQTLGLDSLNVQKAYDVKDTAVTTKAYANQGTTLDVSGLDDAAIKAATGGTQGTASVTGGAVKFDADNNKYFVTIGGFTGADAAKNGDYEVNVATDGTVTLAAGATKTTMPAGATTKTEVQELKDTPAVVSADAKNALIAGGVDATDANGAELVKMSYTDKNGKTIEGGYALKAGDKYYAADYDEATGAIKAKTTSYTAADGTTKTAANQLGGVDGKTEVVTIDGKTYQASKAAGHDFKAQPELAEAAAKTTENPLQKIDAALAQVDALRSDLGAVQNRFNSAITNLGNTVNQLSEARSRIEDSDYATEVSQMSRAQILQQAGTSVLAQANQVPQNVLSLLASGSGSGSKGIAPLQLGKCNIAGWLLGNPECDPLLPVRSWSYIVETPNSENGICYPGDFIDYEELREQLSSVSSFERFEIFPKESSWPNHNTNGVTAACSHEGKSSFYRNLLWLTEKEGSYPKLKNSYVNKKGKEVLVLWGIHHPPNSKEQQNLYQNENAYVSVVTSNYNRRFTPEIAERPKVRDQAGRMNYYWTLLKPGDTIIFEANGNLIAPMYAFALSRGFGSGIITSHHHHHH

SEQ ID NO: 155 - protein, 762 aa, Artificial Sequence
  STF2.HA1-2mutHis (PR8)
MKFLVNVALVFMVVYISYIYAAQVINTNSLSLLTQNNLNKSQSALGTAIERLSSGLRINSAKDDAAGQAIANRFTANIKGLTQASRNANDGISIAQTTEGALNEINNNLQRVRELAVQSANSTNSQSDLDSIQAEITQRLNEIDRVSGQTQFNGVKVLAQDNTLTIQVGANDGETIDIDLKQINSQTLGLDSLNVQKAYDVKDTAVTTKAYANNGTTLDVSGLDDAAIKAATGGTNGTASVTGGAVKFDADNNKYFVTIGGFTGADAAKNGDYEVNVATDGTVTLAAGATKTTMPAGATTKTEVQELKDTPAVVSADAKNALIAGGVDATDANGAELVKMSYTDKNGKTIEGGYALKAGDKYYAADYDEATGAIKAKTTSYTAADGTTKTAANQLGGVDGKTEVVTIDGKTYNASKAAGHDFKAQPELAEAAAKTTENPLQKIDAALAQVDALRSDLGAVQNRFNSAITNLGNTVNNLSEARSRIEDSDYATEVSNMSRAQILQQAGTSVLAQANQVPQNVLSLLASGSGSGSKGAAPLQLGKCNIAGWLLGNPECDPLLPVRSWSDIAETPNSENGICYPGDFIDYEELREQLSSVSSFERFEIFPKESSWPNHNTNGVTAACSHEGKSSFYRNLLWLTEKEGSYPKLKNSYVNKKGKEVLVLWGIHHPPNSKEQQNLYQNENAYVSVVTSNYNRRFTPEIAERPKVRDQAGRMNYYWTLLKPGDTIIFEANGNLIAPMYAFALSRGFGSGIITSHHHHHH

SEQ ID NO: 156 - protein, 761 aa, Artificial Sequence
  ngSTF2.HA1-2mutHis (PR8)
MKFLVNVALVFMVVYISYIYAAQVINTNSLSLLTQNNLQKSQSALGTAIERLSSGLRINSAKDDAAGQAIANRFTANIKGLTQASRNANDGISIAQTTEGALNEINNNLQRVRELAVQSAQSTNSQSDLDSIQAEITQRLNEIDRVSGQTQFNGVKVLAQDNTLTIQVGANDGETIDIDLKQINSQTLGLDSLNVQKAYDVKDTAVTTKAYANQGTTLDVSGLDDAAIKAATGGTQGTASVTGGAVKFDADNNKYFVTIGGFTGADAAKNGDYEVNVATDGTVTLAAGATKTTMPAGATTKTEVQELKDTPAVVSADAKNALIAGGVDATDANGAELVKMSYTDKNGKTIEGGYALKAGDKYYAADYDEATGAIKAKTTSYTAADGTTKTAANQLGGVDGKTEVVTIDGKTYQASKAAGHDFKAQPELAEAAAKTTENPLQKIDAALAQVDALRSDLGAVQNRFNSAITNLGNTVNQLSEARSRIEDSDYATEVSQMSRAQILQQAGTSVLAQANQVPQNVLSLLASGSGSGSKGAAPQLGKCNIAGWLLGNPECDPLLPVRSWSDIAETPNSENGICYPGDFIDYEELREQLSSVSSFERFEIFPKESSWPNHNTNGVTAACSHEGKSSFYRNLLWLTEKEGSYPKLKNSYVNKKGKEVLVLWGIHHPPNSKEQQNLYQNENAYVSVVTSNYNRRFTPEIAERPKVRDQAGRMNYYWTLLKPGDTIIFEANGNLIAPMYAFALSRGFGSGIITSHHHHHH

SEQ ID NO: 157 - protein, 714 aa, Artificial Sequence
  STF2.HA1-3His (PR8)
MKFLVNVALVFMVVYISYIYAAQVINTNSLSLLTQNNLNKSQSALGTAIERLSSGLRINSAKDDAAGQAIANRFTANIKGLTQASRNANDGISIAQTTEGALNEINNNLQRVRELAVQSANSTNSQSDLDSIQAEITQRLNEIDRVSGQTQFNGVKVLAQDNTLTIQVGANDGETIDIDLKQINSQTLGLDSLNVQKAYDVKDTAVTTKAYANNGTTLDVSGLDDAAIKAATGGTNGTASVTGGAVKFDADNNKYFVTIGGFTGADAAKNGDYEVNVATDGTVTLAAGATKTTMPAGATTKTEVQELKDTPAVVSADAKNALIAGGVDATDANGAELVKMSYTDKNGKTIEGGYALKAGDKYYAADYDEATGAIKAKTTSYTAADGTTKTAANQLGGVDGKTEVVTIDGKTYNASKAAGHDFKAQPELAEAAAKTTENPLQKIDAALAQVDALRSDLGAVQNRFNSAITNLGNTVNNLSEARSRIEDSDYATEVSNMSRAQILQQAGTSVLAQANQVPQNVLSLLASGSGSGSNSENGCYPGDFIDYEELREQLSSVSSFERFEIFPKESSWPNHNTNGVTAACSHEGKSSFYRNLLWLTEKEGSYPKLKNSYVNKKGKEVLVLWGIHHPPNSKEQQNLYQNENAYVSVVTSNYNRRFTPEIAERPKVRDQAGRMNYYWTLLKPGDTIIFEANGNLIAPMYAFALSRGHHHHHH

SEQ ID NO: 158 - protein, 715 aa, Artificial Sequence
  STF2.HA1-3mutHis (PR8)
MKFLVNVALVFMVVYISYIYAAQVINTNSLSLLTQNNLNKSQSALGTAIERLSSGLRINSAKDDAAGQAIANRFTANIKGLTQASRNANDGISIAQTTEGALNEINNNLQRVRELAVQSANSTNSQSDLDSIQAEITQRLNEIDRVSGQTQFNGVKVLAQDNTLTIQVGANDGETIDIDLKQINSQTLGLDSLNVQKAYDVKDTAVTTKAYANNGTTLDVSGLDDAAIKAATGGTNGTASVTGGAVKFDADNNKYFVTIGGFTGADAAKNGDYEVNVATDGTVTLAAGATKTTMPAGATTKTEVQELKDTPAVVSADAKNALIAGGVDATDANGAELVKMSYTDKNGKTIEGGYALKAGDKYYAADYDEATGAIKAKTTSYTAADGTTKTAANQLGGVDGKTEVVTIDGKTYNASKAAGHDFKAQPELAEAAAKTTENPLQKIDAALAQVDALRSDLGAVQNRFNSAITNLGNTVNNLSEARSRIEDSDYATEVSNMSRAQILQQAGTSVLAQANQVPQNVLSLLASGSGSGSNSENEICYPGDFIDKEELREQLSSVSSFERFEIFPKESSWPNHNTNGVTAACSHEGKSSFYRNLLWLTEKEGSYPKLKNSYVNKKGKEVLVLWGIHHPPNSKEQQNLYQNENAYVSVVTSNYNRRFTPEIAERPKVRDQAGRMNYYWTLLKPGDTIIFEANGNLIAPMYAAALSRGHHHHHH

SEQ ID NO: 159 - protein, 729 aa, Artificial Sequence
  STF2.HA1-2 (IND)
MAQVINTNSLSLLTQNNLNKSQSALGTAIERLSSGLRINSAKDDAAGQAIANRFTANIKGLTQASRNANDGISIAQTTEGALNEINNNLQRVRELAVQSANSTNSQSDLDSIQAEITQRLNEIDRVSGQTQFNGVKVLAQDNTLTIQVGANDGETIDIDLKQINSQTLGLDSLNVQKAYDVKDTAVTTKAYANNGTTLDVSGLDDAAIKAATGGTNGTASVTGGAVKFDADNNKYFVTIGGFTGADAAKNGDYEVNVATDGTVTLAAGATKTTMPAGATTKTEVQELKDTPAVVSADAKNALIAGGVDATDANGAELVKMSYTDKNGKTIEGGYALKAGDKYYAADYDEATGAIKAKTTSYTAADGTTKTAANQLGGVDGKTEVVTIDGKTYNASKAAGHDFKAQPELAEAAAKTTENPLQKIDAALAQVDALRSDLGAVQNRFNSAITNLGNTVNNLSEARSRIEDSDYATEVSNMSRAQILQQAGTSVLAQANQVPQNVLSLLAGVKPLILRDCSVAGWLLGNPMCDEFINVPEWSYIVEKANPTNDLCYPGSFNDYEELKHLLSRINHFEKIQIIPKSSWSDHEASSGVSSACPYLGSPSFFRNVVWLIKKNSTYPTIKKSYNNTNQEDLLVLWGIHHPNDAAEQTRLYQNPTTYISIGTSTLNQRLVPKIATRSKVNGQSGRMEFFWTILKPNDAINFESNGNFIAPEYAYKIVKKGDSAIMKSE

SEQ ID NO: 160 - DNA, 2433 bp, Artificial Sequence
  STF2delta.HA0shis
atggcacaagtaatcaacactaacagtctgtcgctgctgacccagaataacctgaacaaatcccagtccgcactgggcaccgctatcgagcgtctgtcttctggtctgcgtatcaacagcgcgaaagacgatgcggcaggtcaggcgattgctaaccgtttcaccgcgaacatcaaaggtctgactcaggcttcccgtaacgctaacgacggtatctccattgcgcagaccactgaaggcgcgctgaacgaaatcaacaacaacctgcagcgtgtgcgtgaactggcggttcagtctgctaacagcaccaactcccagtctgacctcgactccatccaggctgaaatcacccagcgcctgaacgaaatcgaccgtgtatccggccagactcagttcaacggcgtgaaagtcctggcgcaggacaacaccctgaccatccaggttggcgccaacgacggtgaaactatcgatatcgatctgaagcagatcaactctcagaccctgggtctggactcactgaacgtgcatggagcgccggtggatcctgctagcccatggaccgaaaacccgctgcagaaaattgatgccgcgctggcgcaggtggatgcgctgcgctctgatctgggtgcggtacaaaaccgtttcaactctgctatcaccaacctgggcaataccgtaaacaatctgtctgaagcgcgtagccgtatcgaagattccgactacgcgaccgaagtttccaacatgtctcgcgcgcagattttgcagcaggccggtacttccgttctggcgcaggctaaccaggtcccgcagaacgtgctgtctctgttacgtgaattctctagatatccagcacagtggcggccgctcgacacaatatgtataggctaccatgcgaacaattcaaccgacactgttgacacagtactcgagaagaatgtgacagtgacacactctgttaacctgctcgaagacagccacaacggaaaactatgtagattaaaaggaatagccccactacaattggggaaatgtaacatcgccggatggcttttgggaaacccagaatgcgacccactgcttccagtgagatcatggtcctacattgtagaaacaccaaactctgagaatggaatatgttatccaggagatttcatcgactatgaggagctgagggagcaattgagctcagtgtcatcattcgaaagattcgaaatatttcccaaagaaagctcatggcccaaccacaacacaaacggagtaacggcagcatgctcccatgaggggaaaagcagtttttacagaaatttgctatggctgacggagaaggagggctcatacccaaagctgaaaaattcttatgtgaacaaaaaagggaaagaagtccttgtactgtggggtattcatcacccgcctaacagtaaggaacaacagaatctctatcagaatgaaaatgcttatgtctctgtagtgacttcaaattataacaggagatttaccccggaaatagcagaaagacccaaagtaagagatcaagctgggaggatgaactattactggaccttgctaaaacccggagacacaataatatttgaggcaaatggaaatctaatagcaccaatgtatgctttcgcactgagtagaggctttgggtccggcatcatcacctcaaacgcatcaatgcatgagtgtaacacgaagtgtcaaacacccctgggagctataaacagcagtctcccttaccagaatatacacccagtcacaataggagagtgcccaaaatacgtcaggagtgccaaattgaggatggttacaggactaaggaacattccgtccattcaatccagaggtctatttggagccattgccggttttattgaagggggatggactggaatgatagatggatggtatggttatcatcatcagaatgaacagggatcaggctatgcagcggatcaaaaaagcacacaaaatgccattaacgggattacaaacaaggtgaacactgttatcgagaaaatgaacattcaattcacagctgtgggtaaagaattcaacaaattagaaaaaaggatggaaaatttaaataaaaaagttgatgatggatttctggacatttggacatataatgcagaattgttagttctactggaaaatgaaaggactctggatttccatgactcaaatgtgaagaatctgtatgagaaagtaaaaagccaattaaagaataatgccaaagaaatcggaaatggatgttttgagttctaccacaagtgtgacaatgaatgcatggaaagtgtaagaaatgggacttatgattatcccaaatattcagaagagtcaaagttgaacagggaaaaggtagatggagtgaaattggaatcaatggggatctatcagacgcgtaccggtcatcatcaccatcaccattga

SEQ ID NO: 161 - DNA, 40 bp, Artificial Sequence
  FOR PRIMER
attctccggcggccgctcgacacaatatgtataggctacc

SEQ ID NO: 162 - DNA, 60 bp, Artificial Sequence
  REV PRIMER
agtcttgcggccgcctattaatggtgatggtgatgatgctgatagatccccattgattcc

SEQ ID NO: 163 - DNA, 1533 bp, Artificial Sequence
  HA0s PR8 template
gacacaatatgtataggctaccatgcgaacaattcaaccgacactgttgacacagtactcgagaagaatgtgacagtgacacactctgttaacctgctcgaagacagccacaacggaaaactatgtagattaaaaggaatagccccactacaattggggaaatgtaacatcgccggatggcttttgggaaacccagaatgcgacccactgcttccagtgagatcatggtcctacattgtagaaacaccaaactctgagaatggaatatgttatccaggagatttcatcgactatgaggagctgagggagcaattgagctcagtgtcatcattcgaaagattcgaaatatttcccaaagaaagctcatggcccaaccacaacacaaacggagtaacggcagcatgctcccatgaggggaaaagcagtttttacagaaatttgctatggctgacggagaaggagggctcatacccaaagctgaaaaattcttatgtgaacaaaaaagggaaagaagtccttgtactgtggggtattcatcacccgcctaacagtaaggaacaacagaatctctatcagaatgaaaatgcttatgtctctgtagtgacttcaaattataacaggagatttaccccggaaatagcagaaagacccaaagtaagagatcaagctgggaggatgaactattactggaccttgctaaaacccggagacacaataatatttgaggcaaatggaaatctaatagcaccaatgtatgctttcgcactgagtagaggctttgggtccggcatcatcacctcaaacgcatcaatgcatgagtgtaacacgaagtgtcaaacacccctgggagctataaacagcagtctcccttaccagaatatacacccagtcacaataggagagtgcccaaaatacgtcaggagtgccaaattgaggatggttacaggactaaggaacattccgtccattcaatccagaggtctatttggagccattgccggttttattgaagggggatggactggaatgatagatggatggtatggttatcatcatcagaatgaacagggatcaggctatgcagcggatcaaaaaagcacacaaaatgccattaacgggattacaaacaaggtgaacactgttatcgagaaaatgaacattcaattcacagctgtgggtaaagaattcaacaaattagaaaaaaggatggaaaatttaaataaaaaagttgatgatggatttctggacatttggacatataatgcagaattgttagttctactggaaaatgaaaggactctggatttccatgactcaaatgtgaagaatctgtatgagaaagtaaaaagccaattaaagaataatgccaaagaaatcggaaatggatgttttgagttctaccacaagtgtgacaatgaatgcatggaaagtgtaagaaatgggacttatgattatcccaaatattcagaagagtcaaagttgaacagggaaaaggtagatggagtgaaattggaatcaatggggatctatcag

SEQ ID NO: 164 - DNA, 2403 bp, Artificial Sequence
  STF2delta.HA0s
atggcacaagtaatcaacactaacagtctgtcgctgctgacccagaataacctgaacaaatcccagtccgcactgggcaccgctatcgagcgtctgtcttctggtctgcgtatcaacagcgcgaaagacgatgcggcaggtcaggcgattgctaaccgtttcaccgcgaacatcaaaggtctgactcaggcttcccgtaacgctaacgacggtatctccattgcgcagaccactgaaggcgcgctgaacgaaatcaacaacaacctgcagcgtgtgcgtgaactggcggttcagtctgctaacagcaccaactcccagtctgacctcgactccatccaggctgaaatcacccagcgcctgaacgaaatcgaccgtgtatccggccagactcagttcaacggcgtgaaagtcctggcgcaggacaacaccctgaccatccaggttggcgccaacgacggtgaaactatcgatatcgatctgaagcagatcaactctcagaccctgggtctggactcactgaacgtgcatggagcgccggtggatcctgctagcccatggaccgaaaacccgctgcagaaaattgatgccgcgctggcgcaggtggatgcgctgcgctctgatctgggtgcggtacaaaaccgtttcaactctgctatcaccaacctgggcaataccgtaaacaatctgtctgaagcgcgtagccgtatcgaagattccgactacgcgaccgaagtttccaacatgtctcgcgcgcagattttgcagcaggccggtacttccgttctggcgcaggctaaccaggtcccgcagaacgtgctgtctctgttacgtgaattctctagatatccagcacagtggcggccgctcgacacaatatgtataggctaccatgcgaacaattcaaccgacactgttgacacagtactcgagaagaatgtgacagtgacacactctgttaacctgctcgaagacagccacaacggaaaactatgtagattaaaaggaatagccccactacaattggggaaatgtaacatcgccggatggcttttgggaaacccagaatgcgacccactgcttccagtgagatcatggtcctacattgtagaaacaccaaactctgagaatggaatatgttatccaggagatttcatcgactatgaggagctgagggagcaattgagctcagtgtcatcattcgaaagattcgaaatatttcccaaagaaagctcatggcccaaccacaacacaaacggagtaacggcagcatgctcccatgaggggaaaagcagtttttacagaaatttgctatggctgacggagaaggagggctcatacccaaagctgaaaaattcttatgtgaacaaaaaagggaaagaagtccttgtactgtggggtattcatcacccgcctaacagtaaggaacaacagaatctctatcagaatgaaaatgcttatgtctctgtagtgacttcaaattataacaggagatttaccccggaaatagcagaaagacccaaagtaagagatcaagctgggaggatgaactattactggaccttgctaaaacccggagacacaataatatttgaggcaaatggaaatctaatagcaccaatgtatgctttcgcactgagtagaggctttgggtccggcatcatcacctcaaacgcatcaatgcatgagtgtaacacgaagtgtcaaacacccctgggagctataaacagcagtctcccttaccagaatatacacccagtcacaataggagagtgcccaaaatacgtcaggagtgccaaattgaggatggttacaggactaaggaacattccgtccattcaatccagaggtctatttggagccattgccggttttattgaagggggatggactggaatgatagatggatggtatggttatcatcatcagaatgaacagggatcaggctatgcagcggatcaaaaaagcacacaaaatgccattaacgggattacaaacaaggtgaacactgttatcgagaaaatgaacattcaattcacagctgtgggtaaagaattcaacaaattagaaaaaaggatggaaaatttaaataaaaaagttgatgatggatttctggacatttggacatataatgcagaattgttagttctactggaaaatgaaaggactctggatttccatgactcaaatgtgaagaatctgtatgagaaagtaaaaagccaattaaagaataatgccaaagaaatcggaaatggatgttttgagttctaccacaagtgtgacaatgaatgcatggaaagtgtaagaaatgggacttatgattatcccaaatattcagaagagtcaaagttgaacagggaaaaggtagatggagtgaaattggaatcaatggggatctatcagtag

SEQ ID NO: 165 - DNA, 40 bp, Artificial Sequence; identical to SEQ ID NO: 161
  FOR PRIMER

SEQ ID NO: 166 - DNA, 60 bp, Artificial Sequence; identical to SEQ ID NO: 162
  REV PRIMER

SEQ ID NO: 167 - DNA, 2403 bp, Artificial Sequence
  HA0s.STF2delta
gacacaatatgtataggctaccatgcgaacaattcaaccgacactgttgacacagtactcgagaagaatgtgacagtgacacactctgttaacctgctcgaagacagccacaacggaaaactatgtagattaaaaggaatagccccactacaattggggaaatgtaacatcgccggatggcttttgggaaacccagaatgcgacccactgcttccagtgagatcatggtcctacattgtagaaacaccaaactctgagaatggaatatgttatccaggagatttcatcgactatgaggagctgagggagcaattgagctcagtgtcatcattcgaaagattcgaaatatttcccaaagaaagctcatggcccaaccacaacacaaacggagtaacggcagcatgctcccatgaggggaaaagcagtttttacagaaatttgctatggctgacggagaaggagggctcatacccaaagctgaaaaattcttatgtgaacaaaaaagggaaagaagtccttgtactgtggggtattcatcacccgcctaacagtaaggaacaacagaatctctatcagaatgaaaatgcttatgtctctgtagtgacttcaaattataacaggagatttaccccggaaatagcagaaagacccaaagtaagagatcaagctgggaggatgaactattactggaccttgctaaaacccggagacacaataatatttgaggcaaatggaaatctaatagcaccaatgtatgctttcgcactgagtagaggctttgggtccggcatcatcacctcaaacgcatcaatgcatgagtgtaacacgaagtgtcaaacacccctgggagctataaacagcagtctcccttaccagaatatacacccagtcacaataggagagtgcccaaaatacgtcaggagtgccaagttgaggatggttacaggactaaggaacattccgtccattcaatccagaggtctatttggagccattgccggttttattgaagggggatggactggaatgatagatggatggtatggttatcatcatcagaatgaacagggatcaggctatgcagcggatcaaaaaagcacacaaaatgccattaacgggattacaaacaaggtgaacactgttatcgagaaaatgaacattcaattcacagctgtgggtaaagaattcaacaaattagaaaaaaggatggaaaatttaaataaaaaagttgatgatggatttctggacatttggacatataatgcagaattgttagttctactggaaaatgaaaggactctggatttccatgactcaaatgtgaagaatctgtatgagaaagtaaaaagccaattaaagaataatgccaaagaaatcggaaatggatgttttgagttctaccacaagtgtgacaatgaatgcatggaaagtgtaagaaatgggacttatgattatcccaaatattcagaagagtcaaagttgaacagggaaaaggtagatggagtgaaattggaatcaatggggatctatcaggaattctctagatatccagcacagtggcggccgctcgcacaagtaatcaacactaacagtctgtcgctgctgacccagaataacctgaacaaatcccagtccgcactgggcaccgctatcgagcgtctgtcttctggtctgcgtatcaacagcgcgaaagacgatgcggcaggtcaggcgattgctaaccgtttcaccgcgaacatcaaaggtctgactcaggcttcccgtaacgctaacgacggtatctccattgcgcagaccactgaaggcgcgctgaacgaaatcaacaacaacctgcagcgtgtgcgtgaactggcggttcagtctgctaacagcaccaactcccagtctgacctcgactccatccaggctgaaatcacccagcgcctgaacgaaatcgaccgtgtatccggccagactcagttcaacggcgtgaaagtcctggcgcaggacaacaccctgaccatccaggttggcgccaacgacggtgaaactatcgatatcgatctgaagcagatcaactctcagaccctgggtctggactcactgaacgtgcatggagcgccggtggatcctgctagcccatggaccgaaaacccgctgcagaaaattgatgccgcgctggcgcaggtggatgcgctgcgctctgatctgggtgcggtacaaaaccgtttcaactctgctatcaccaacctgggcaataccgtaaacaatctgtctgaagcgcgtagccgtatcgaagattccgactacgcgaccgaagtttccaacatgtctcgcgcgcagattttgcagcaggccggtacttccgttctggcgcaggctaaccaggtcccgcagaacgtgctgtctctgttacgttaatag

SEQ ID NO: 168 - DNA, 33 bp, Artificial Sequence
  FOR PRIMER
aggcaagatctgacacaatatgtataggctacc

SEQ ID NO: 169 - DNA, 36 bp, Artificial Sequence
  REV PRIMER
agtcagacgcgtctattaacgtaacagagacagcac

SEQ ID NO: 170 - DNA, 1566 bp, Artificial Sequence
  Ha0s.his
gacacaatatgtataggctaccatgcgaacaattcaaccgacactgttgacacagtactcgagaagaatgtgacagtgacacactctgttaacctgctcgaagacagccacaacggaaaactatgtagattaaaaggaatagccccactacaattggggaaatgtaacatcgccggatggcttttgggaaacccagaatgcgacccactgcttccagtgagatcatggtcctacattgtagaaacaccaaactctgagaatggaatatgttatccaggagatttcatcgactatgaggagctgagggagcaattgagctcagtgtcatcattcgaaagattcgaaatatttcccaaagaaagctcatggcccaaccacaacacaaacggagtaacggcagcatgctcccatgaggggaaaagcagtttttacagaaatttgctatggctgacggagaaggagggctcatacccaaagctgaaaaattcttatgtgaacaaaaaagggaaagaagtccttgtactgtggggtattcatcacccgcctaacagtaaggaacaacagaatctctatcagaatgaaaatgcttatgtctctgtagtgacttcaaattataacaggagatttaccccggaaatagcagaaagacccaaagtaagagatcaagctgggaggatgaactattactggaccttgctaaaacccggagacacaataatatttgaggcaaatggaaatctaatagcaccaatgtatgctttcgcactgagtagaggctttgggtccggcatcatcacctcaaacgcatcaatgcatgagtgtaacacgaagtgtcaaacacccctgggagctataaacagcagtctcccttaccagaatatacacccagtcacaataggagagtgcccaaaatacgtcaggagtgccaaattgaggatggttacaggactaaggaacattccgtccattcaatccagaggtctatttggagccattgccggttttattgaagggggatggactggaatgatagatggatggtatggttatcatcatcagaatgaacagggatcaggctatgcagcggatcaaaaaagcacacaaaatgccattaacgggattacaaacaaggtgaacactgttatcgagaaaatgaacattcaattcacagctgtgggtaaagaattcaacaaattagaaaaaaggatggaaaatttaaataaaaaagttgatgatggatttctggacatttggacatataatgcagaattgttagttctactggaaaatgaaaggactctggatttccatgactcaaatgtgaagaatctgtatgagaaagtaaaaagccaattaaagaataatgccaaagaaatcggaaatggatgttttgagttctaccacaagtgtgacaatgaatgcatggaaagtgtaagaaatgggacttatgattatcccaaatattcagaagagtcaaagttgaacagggaaaaggtagatggagtgaaattggaatcaatggggatctatcagacgcgtaccggtcatcatcaccatcaccattga

SEQ ID NO: 171 - DNA, 40 bp, Artificial Sequence; identical to SEQ ID NO: 161
  FOR PRIMER

SEQ ID NO: 172 - DNA, 60 bp, Artificial Sequence; identical to SEQ ID NO: 162
  HA0s

SEQ ID NO: 173 - DNA, 1533 bp, Artificial Sequence; identical to SEQ ID NO: 163
  HA0s

SEQ ID NO: 174 - DNA, 33 bp, Artificial Sequence; identical to SEQ ID NO: 168
  FOR PRIMER

SEQ ID NO: 175 - DNA, 36 bp, Artificial Sequence; identical to SEQ ID NO: 169
  REV PRIMER

SEQ ID NO: 176 - protein, 517 aa, Artificial Sequence
  HA0sHis (PR8)
DTICIGYHANNSTDTVDTVLEKNVTVTHSVNLLEDSHNGKLCRLKGIAPLQLGKCNIAGWLLGNPECDPLLPVRSWSYIVETPNSENGICYPGDFIDYEELREQLSSVSSFERFEIFPKESSWPNHNTNGVTAACSHEGKSSFYRNLLWLTEKEGSYPKLKNSYVNKKGKEVLVLWGIHHPPNSKEQQNLYQNENAYVSVVTSNYNRRFTPEIAERPKVRDQAGRMNYYWTLLKPGDTIIFEANGNLIAPMYAFALSRGFGSGIITSNASMHECNTKCQTPLGAINSSLPYQNIHPVTIGECPKYVRSAKLRMVTGLRNIPSIQSRGLFGAIAGFIEGGWTGMIDGWYGYHHQNEQGSGYAADQKSTQNAINGITNKVNTVIEKMNIQFTAVGKEFNKLEKRMENLNKKVDDGFLDIWTYNAELLVLLENERTLDFHDSNVKNLYEKVKSQLKNNAKEIGNGCFEFYHKCDNECMESVRNGTYDYPKYSEESKLNREKVDGVKLESMGIYQHHHHHH

SEQ ID NO: 177 - protein, 800 aa, Artificial Sequence
  STF2delta.HA0s (PR8)
MAQVINTNSLSLLTQNNLNKSQSALGTAIERLSSGLRINSAKDDAAGQAIANRFTANIKGLTQASRNANDGISIAQTTEGALNEINNNLQRVRELAVQSANSTNSQSDLDSIQAEITQRLNEIDRVSGQTQFNGVKVLAQDNTLTIQVGANDGETIDIDLKQINSQTLGLDSLNVHGAPVDPASPWTENPLQKIDAALAQVDALRSDLGAVQNRFNSAITNLGNTVNNLSEARSRIEDSDYATEVSNMSRAQILQQAGTSVLAQANQVPQNVLSLLREFSRYPAQWRPLDTICIGYHANNSTDTVDTVLEKNVTVTHSVNLLEDSHNGKLCRLKGIAPLQLGKCNIAGWLLGNPECDPLLPVRSWSYIVETPNSENGICYPGDFIDYEELREQLSSVSSFERFEIFPKESSWPNHNTNGVTAACSHEGKSSFYRNLLWLTEKEGSYPKLKNSYVNKKGKEVLVLWGIHHPPNSKEQQNLYQNENAYVSVVTSNYNRRFTPEIAERPKVRDQAGRMNYYWTLLKPGDTIIFEANGNLIAPMYAFALSRGFGSGIITSNASMHECNTKCQTPLGAINSSLPYQNIHPVTIGECPKYVRSAKLRMVTGLRNIPSIQSRGLFGAIAGFIEGGWTGMIDGWYGYHHQNEQGSGYAADQKSTQNAINGITNKVNTVIEKMNIQFTAVGKEFNKLEKRMENLNKKVDDGFLDIWTYNAELLVLLENERTLDFHDSNVKNLYEKVKSQLKNNAKEIGNGCFEFYHKCDNECMESVRNGTYDYPKYSEESKLNREKVDGVKLESMGIYQ

SEQ ID NO: 178 - DNA, 1518 bp, Artificial Sequence
  STF2
atggcacaagtaatcaacactaacagtctgtcgctgctgacccagaataacctgaacaaatcccagtccgcactgggcaccgctatcgagcgtctgtcttctggtctgcgtatcaacagcgcgaaagacgatgcggcaggtcaggcgattgctaaccgtttcaccgcgaacatcaaaggtctgactcaggcttcccgtaacgctaacgacggtatctccattgcgcagaccactgaaggcgcgctgaacgaaatcaacaacaacctgcagcgtgtgcgtgaactggcggttcagtctgctaacagcaccaactcccagtctgacctcgactccatccaggctgaaatcacccagcgcctgaacgaaatcgaccgtgtatccggccagactcagttcaacggcgtgaaagtcctggcgcaggacaacaccctgaccatccaggttggcgccaacgacggtgaaactatcgatatcgatctgaagcagatcaactctcagaccctgggtctggactcactgaacgtgcagaaagcgtatgatgtgaaagatacagcagtaacaacgaaagcttatgccaataatggtactacactggatgtatcgggtcttgatgatgcagctattaaagcggctacgggtggtacgaatggtacggcttctgtaaccggtggtgcggttaaatttgacgcagataataacaagtactttgttactattggtggctttactggtgctgatgccgccaaaaatggcgattatgaagttaacgttgctactgacggtacagtaacccttgcggctggcgcaactaaaaccacaatgcctgctggtgcgacaactaaaacagaagtacaggagttaaaagatacaccggcagttgtttcagcagatgctaaaaatgccttaattgctggcggcgttgacgctaccgatgctaatggcgctgagttggtcaaaatgtcttataccgataaaaatggtaagacaattgaaggcggttatgcgcttaaagctggcgataagtattacgccgcagattacgatgaagcgacaggagcaattaaagctaaaactacaagttatactgctgctgacggcactaccaaaacagcggctaaccaactgggtggcgtagacggtaaaaccgaagtcgttactatcgacggtaaaacctacaatgccagcaaagccgctggtcatgatttcaaagcacaaccagagctggcggaagcagccgctaaaaccaccgaaaacccgctgcagaaaattgatgccgcgctggcgcaggtggatgcgctgcgctctgatctgggtgcggtacaaaaccgtttcaactctgctatcaccaacctgggcaataccgtaaacaatctgtctgaagcgcgtagccgtatcgaagattccgactacgcgaccgaagtttccaacatgtctcgcgcgcagattctgcagcaggccggtacttccgttctggcgcaggctaaccaggtcccgcagaacgtgctgtctctgttacgt

SEQ ID NO: 179 - protein, 299 aa, Artificial Sequence
  HA1-1his (PR8)
MKFLVNVALVFMVVYISYIYASHNGKLCRLKGIAPLQLGKCNIAGWLLGNPECDPLLPVRSWSYIVETPNSENGICYPGDFIDYEELREQLSSVSSFERFEIFPKESSWPNHNTNGVTAACSHEGKSSFYRNLLWLTEKEGSYPKLKNSYVNKKGKEVLVLWGIHHPPNSKEQQNLYQNENAYVSVVTSNYNRRFTPEIAERPKVRDQAGRMNYYWTLLKPGDTIIFEANGNLIAPMYAFALSRGFGSGIITSNASMHECNTKCQTPLGAINSSLPYQNIHPVTIGECPKYVRHHHHHH

SEQ ID NO: 180 - protein, 301 aa, Artificial Sequence
  HA1-1his (VN)
MKFLVNVALVFMVVYISYIYAEKKHNGKLCDLDGVKPLILRDCSVAGWLLGNPMCDEFINVPEWSYIVEKANPVNDLCYPGDFNDYEELKHLLSRINHFEKIQIIPKSSWSSHEASLGVSSACPYQGKSSFFRNVVWLIKKNSTYPTIKRSYNNTNQEDLLVLWGIHHPNDAAEQTKLYQNPTTYISVGTSTLNQRLVPRIATRSKVNGQSGRMEFFWTILKPNDAINFESNGNFIAPEYAYKIVKKGDSTIMKSELEYGNCNTKCQTPMGAINSSMPFHNIHPLTIGECPKYVKHHHHHH

SEQ ID NO: 181 - protein, 301 aa, Artificial Sequence
  HA1-1his (IND)
MKFLVNVALVFMVVYISYIYAEKTHNGKLCDLDGVKPLILRDCSVAGWLLGNPMCDEFINVPEWSYIVEKANPTNDLCYPGSFNDYEELKHLLSRINHFEKIQIIPKSSWSDHEASSGVSSACPYLGSPSFFRNVVWLIKKNSTYPTIKKSYNNTNQEDLLVLWGIHHPNDAAEQTRLYQNPTTYISIGTSTLNQRLVPKIATRSKVNGQSGRMEFFWTILKPNDAINFESNGNFIAPEYAYKIVKKGDSAIMKSELEYGNCNTKCQTPMGAINSSMPFHNIHPLTIGECPKYVKHHHHHH

SEQ ID NO: 182 - protein, 299 aa, Artificial Sequence
  HA1-1his (NC)
MKFLVNVALVFMVVYISYIYASHNGKLCLLKGIAPLQLGNCSVAGWILGNPECELLISKESWSYIVETPNPENGTCYPGYFADYEELREQLSSVSSFERFEIFPKESSWPNHTVTGVSASCSHNGKSSFYRNLLWLTGKNGLYPNLSKSYVNNKEKEVLVLWGVHHPPNIGNQRALYHTENAYVSVVSSHYSRRFTPEIAKRPKVRDQEGRINYYWTLLEPGDTIIFEANGNLIAPWYAFALSRGFGSGIITSNAPMDECDAKCQTPQGAINSSLPFQNVHPVTIGECPKYVRHHHHHH

SEQ ID NO: 183 - DNA, 888 bp, Artificial Sequence
  HA1-1 (MAL)
accactaccccaaccaaatctcacttcgcaaacctgaaaggcactgaaacccgtggcaagctgtgtccgaagtgtctgaactgcaccgatctggacgtcgcactgggtcgtccgaaatgtactggtaacattccgtccgcgcgtgtctccatcctgcatgaagtgcgtccagtgacctccggctgttttccgattatgcatgatcgtactaaaatccgtcagctgccgaacctgctgcgtggttacgaacacattcgtctgtccacccataacgttatcaacgcggaaaacgcgccgggcggtagctataaaatcggtacctctggttcttgcccgaacgtgactaacggtaacggcttctttgcaaccatggcctgggcggtcccgaaaaacgacaacaacaagaccgcgaccaattccctgaccatcgaagtcccgtatatctgcaccgaaggtgaagatcaaatcacggtttggggcttccactccgacaacgaggcacaaatggcgaaactgtacggtgacagcaaaccgcaaaaattcactagctccgctaacggtgttaccacccactacgtttcccagatcggtggtttcccaaaccagaccgaagatggtggtctgccgcagtccggtcgcatcgttgtagattatatggtgcagaaaagcggtaaaaccggtaccatcacctaccagcgtggcatcctgctgccgcagaaagtttggtgcgcttccggtcgtagcaaagtaatcaaaggttccctgccgctgatcggtgaagcagactgcctgcacgagaaatacggcggtctgaacaaaagcaagccgtactataccggcgaacatgcgaaagcaattggtaactgtccaatttgggtgaaatagtag

SEQ ID NO: 184 - DNA, 2406 bp, Artificial Sequence
  STF2.HA1-1 (MAL)
atggcacaagtaatcaacactaacagtctgtcgctgctgacccagaataacctgaacaaatcccagtccgcactgggcaccgctatcgagcgtctgtcttctggtctgcgtatcaacagcgcgaaagacgatgcggcaggtcaggcgattgctaaccgtttcaccgcgaacatcaaaggtctgactcaggcttcccgtaacgctaacgacggtatctccattgcgcagaccactgaaggcgcgctgaacgaaatcaacaacaacctgcagcgtgtgcgtgaactggcggttcagtctgctaacagcaccaactcccagtctgacctcgactccatccaggctgaaatcacccagcgcctgaacgaaatcgaccgtgtatccggccagactcagttcaacggcgtgaaagtcctggcgcaggacaacaccctgaccatccaggttggcgccaacgacggtgaaactatcgatatcgatctgaagcagatcaactctcagaccctgggtctggactcactgaacgtgcagaaagcgtatgatgtgaaagatacagcagtaacaacgaaagcttatgccaataatggtactacactggatgtatcgggtcttgatgatgcagctattaaagcggctacgggtggtacgaatggtacggcttctgtaaccggtggtgcggttaaatttgacgcagataataacaagtactttgttactattggtggctttactggtgctgatgccgccaaaaatggcgattatgaagttaacgttgctactgacggtacagtaacccttgcggctggcgcaactaaaaccacaatgcctgctggtgcgacaactaaaacagaagtacaggagttaaaagatacaccggcagttgtttcagcagatgctaaaaatgccttaattgctggcggcgttgacgctaccgatgctaatggcgctgagttggtcaaaatgtcttataccgataaaaatggtaagacaattgaaggcggttatgcgcttaaagctggcgataagtattacgccgcagattacgatgaagcgacaggagcaattaaagctaaaactacaagttatactgctgctgacggcactaccaaaacagcggctaaccaactgggtggcgtagacggtaaaaccgaagtcgttactatcgacggtaaaacctacaatgccagcaaagccgctggtcatgatttcaaagcacaaccagagctggcggaagcagccgctaaaaccaccgaaaacccgctgcagaaaattgatgccgcgctggcgcaggtggatgcgctgcgctctgatctgggtgcggtacaaaaccgtttcaactctgctatcaccaacctgggcaataccgtaaacaatctgtctgaagcgcgtagccgtatcgaagattccgactacgcgaccgaagtttccaacatgtctcgcgcgcagattctgcagcaggccggtacttccgttctggcgcaggctaaccaggtcccgcagaacgtgctgtctctgttagcgaccactaccccaaccaaatctcacttcgcaaacctgaaaggcactgaaacccgtggcaagctgtgtccgaagtgtctgaactgcaccgatctggacgtcgcactgggtcgtccgaaatgtactggtaacattccgtccgcgcgtgtctccatcctgcatgaagtgcgtccagtgacctccggctgttttccgattatgcatgatcgtactaaaatccgtcagctgccgaacctgctgcgtggttacgaacacattcgtctgtccacccataacgttatcaacgcggaaaacgcgccgggcggtagctataaaatcggtacctctggttcttgcccgaacgtgactaacggtaacggcttctttgcaaccatggcctgggcggtcccgaaaaacgacaacaacaagaccgcgaccaattccctgaccatcgaagtcccgtatatctgcaccgaaggtgaagatcaaatcacggtttggggcttccactccgacaacgaggcacaaatggcgaaactgtacggtgacagcaaaccgcaaaaattcactagctccgctaacggtgttaccacccactacgtttcccagatcggtggtttcccaaaccagaccgaagatggtggtctgccgcagtccggtcgcatcgttgtagattatatggtgcagaaaagcggtaaaaccggtaccatcacctaccagcgtggcatcctgctgccgcagaaagtttggtgcgcttccggtcgtagcaaagtaatcaaaggttccctgccgctgatcggtgaagcagactgcctgcacgagaaatacggcggtctgaacaaaagcaagccgtactataccggcgaacatgcgaaagcaattggtaactgtccaatttgggtgaaatagtag

SEQ ID NO: 185 - DNA, 729 bp, Artificial Sequence
  HA1-2 (MAL)
aaaggcactgaaacccgtggcaagctgtgtccgaagtgtctgaactgcaccgatctggacgtcgcactgggtcgtccgaaatgtactggtaacattccgtccgcgcgtgtctccatcctgcatgaagtgcgtccagtgacctccggctgttttccgattatgcatgatcgtactaaaatccgtcagctgccgaacctgctgcgtggttacgaacacattcgtctgtccacccataacgttatcaacgcggaaaacgcgccgggcggtagctataaaatcggtacctctggttcttgcccgaacgtgactaacggtaacggcttctttgcaaccatggcctgggcggtcccgaaaaacgacaacaacaagaccgcgaccaattccctgaccatcgaagtcccgtatatctgcaccgaaggtgaagatcaaatcacggtttggggcttccactccgacaacgaggcacaaatggcgaaactgtacggtgacagcaaaccgcaaaaattcactagctccgctaacggtgttaccacccactacgtttcccagatcggtggtttcccaaaccagaccgaagatggtggtctgccgcagtccggtcgcatcgttgtagattatatggtgcagaaaagcggtaaaaccggtaccatcacctaccagcgtggcatcctgctgccgcagaaagtttggtgcgcttccggtcgtagcaaagtaatcaaaggttgatag

SEQ ID NO: 186 - DNA, 2247 bp, Artificial Sequence
  STF2.HA1-2 (MAL)
atggcacaagtaatcaacactaacagtctgtcgctgctgacccagaataacctgaacaaatcccagtccgcactgggcaccgctatcgagcgtctgtcttctggtctgcgtatcaacagcgcgaaagacgatgcggcaggtcaggcgattgctaaccgtttcaccgcgaacatcaaaggtctgactcaggcttcccgtaacgctaacgacggtatctccattgcgcagaccactgaaggcgcgctgaacgaaatcaacaacaacctgcagcgtgtgcgtgaactggcggttcagtctgctaacagcaccaactcccagtctgacctcgactccatccaggctgaaatcacccagcgcctgaacgaaatcgaccgtgtatccggccagactcagttcaacggcgtgaaagtcctggcgcaggacaacaccctgaccatccaggttggcgccaacgacggtgaaactatcgatatcgatctgaagcagatcaactctcagaccctgggtctggactcactgaacgtgcagaaagcgtatgatgtgaaagatacagcagtaacaacgaaagcttatgccaataatggtactacactggatgtatcgggtcttgatgatgcagctattaaagcggctacgggtggtacgaatggtacggcttctgtaaccggtggtgcggttaaatttgacgcagataataacaagtactttgttactattggtggctttactggtgctgatgccgccaaaaatggcgattatgaagttaacgttgctactgacggtacagtaacccttgcggctggcgcaactaaaaccacaatgcctgctggtgcgacaactaaaacagaagtacaggagttaaaagatacaccggcagttgtttcagcagatgctaaaaatgccttaattgctggcggcgttgacgctaccgatgctaatggcgctgagttggtcaaaatgtcttataccgataaaaatggtaagacaattgaaggcggttatgcgcttaaagctggcgataagtattacgccgcagattacgatgaagcgacaggagcaattaaagctaaaactacaagttatactgctgctgacggcactaccaaaacagcggctaaccaactgggtggcgtagacggtaaaaccgaagtcgttactatcgacggtaaaacctacaatgccagcaaagccgctggtcatgatttcaaagcacaaccagagctggcggaagcagccgctaaaaccaccgaaaacccgctgcagaaaattgatgccgcgctggcgcaggtggatgcgctgcgctctgatctgggtgcggtacaaaaccgtttcaactctgctatcaccaacctgggcaataccgtaaacaatctgtctgaagcgcgtagccgtatcgaagattccgactacgcgaccgaagtttccaacatgtctcgcgcgcagattctgcagcaggccggtacttccgttctggcgcaggctaaccaggtcccgcagaacgtgctgtctctgttagcgaaaggcactgaaacccgtggcaagctgtgtccgaagtgtctgaactgcaccgatctggacgtcgcactgggtcgtccgaaatgtactggtaacattccgtccgcgcgtgtctccatcctgcatgaagtgcgtccagtgacctccggctgttttccgattatgcatgatcgtactaaaatccgtcagctgccgaacctgctgcgtggttacgaacacattcgtctgtccacccataacgttatcaacgcggaaaacgcgccgggcggtagctataaaatcggtacctctggttcttgcccgaacgtgactaacggtaacggcttctttgcaaccatggcctgggcggtcccgaaaaacgacaacaacaagaccgcgaccaattccctgaccatcgaagtcccgtatatctgcaccgaaggtgaagatcaaatcacggtttggggcttccactccgacaacgaggcacaaatggcgaaactgtacggtgacagcaaaccgcaaaaattcactagctccgctaacggtgttaccacccactacgtttcccagatcggtggtttcccaaaccagaccgaagatggtggtctgccgcagtccggtcgcatcgttgtagattatatggtgcagaaaagcggtaaaaccggtaccatcacctaccagcgtggcatcctgctgccgcagaaagtttggtgcgcttccggtcgtagcaaagtaatcaaaggttgatag

SEQ ID NO: 187 - DNA, 725 bp, Artificial Sequence
  HA1-2 (SH)
aaaggcactcgtacccgcggtaagctgtgcccggactgcctgaactgtaccgatctggatgttgcactgggtcgtccgatgtgcgttggtaccaccccgtctgcgaaagccagcatcctgcacgaagttcgcccggttacttccggttgtttcccgattatgcatgatcgtaccaaaattcgtcagctgccaaacctgctgcgtggctatgaaaacattcgtctgtccactcaaaacgtaatcgatgcagaaaaagcgctgggtggcccgtatcgtctgggtaccagcggctcctgcccgaacgcgacgagcaaaagcggcttcttcgccaccatggcttgggccgttccgaaagacaacaacaaaaacgctacgaacccgctgaccgtcgaagtcccgtacatctgcaccgaaggcgaagatcagatcactgtgtggggcttccacagcgatgataagacccagatgaaaaatctgtacggtgactccaacccgcagaaattcacctcttctgctaacggtgtaacgacccactacgtttctcagatcggtggtttcccggaccagacggaagatggcggtctgcctcagtccggccgcatcgtagttgattacatggtccagaaaccgggtaagactggtaccattgtttaccagcgtggtgtactgctgccgcagaaggtctggtgtgcttccggccgttccaaggtcattaagggctgata

SEQ ID NO: 188 - DNA, 2244 bp, Artificial Sequence
  STF2.HA1-2 (SH)
atggcacaagtaatcaacactaacagtctgtcgctgctgacccagaataacctgaacaaatcccagtccgcactgggcaccgctatcgagcgtctgtcttctggtctgcgtatcaacagcgcgaaagacgatgcggcaggtcaggcgattgctaaccgtttcaccgcgaacatcaaaggtctgactcaggcttcccgtaacgctaacgacggtatctccattgcgcagaccactgaaggcgcgctgaacgaaatcaacaacaacctgcagcgtgtgcgtgaactggcggttcagtctgctaacagcaccaactcccagtctgacctcgactccatccaggctgaaatcacccagcgcctgaacgaaatcgaccgtgtatccggccagactcagttcaacggcgtgaaagtcctggcgcaggacaacaccctgaccatccaggttggcgccaacgacggtgaaactatcgatatcgatctgaagcagatcaactctcagaccctgggtctggactcactgaacgtgcagaaagcgtatgatgtgaaagatacagcagtaacaacgaaagcttatgccaataatggtactacactggatgtatcgggtcttgatgatgcagctattaaagcggctacgggtggtacgaatggtacggcttctgtaaccggtggtgcggttaaatttgacgcagataataacaagtactttgttactattggtggctttactggtgctgatgccgccaaaaatggcgattatgaagttaacgttgctactgacggtacagtaacccttgcggctggcgcaactaaaaccacaatgcctgctggtgcgacaactaaaacagaagtacaggagttaaaagatacaccggcagttgtttcagcagatgctaaaaatgccttaattgctggcggcgttgacgctaccgatgctaatggcgctgagttggtcaaaatgtcttataccgataaaaatggtaagacaattgaaggcggttatgcgcttaaagctggcgataagtattacgccgcagattacgatgaagcgacaggagcaattaaagctaaaactacaagttatactgctgctgacggcactaccaaaacagcggctaaccaactgggtggcgtagacggtaaaaccgaagtcgttactatcgacggtaaaacctacaatgccagcaaagccgctggtcatgatttcaaagcacaaccagagctggcggaagcagccgctaaaaccaccgaaaacccgctgcagaaaattgatgccgcgctggcgcaggtggatgcgctgcgctctgatctgggtgcggtacaaaaccgtttcaactctgctatcaccaacctgggcaataccgtaaacaatctgtctgaagcgcgtagccgtatcgaagattccgactacgcgaccgaagtttccaacatgtctcgcgcgcagattctgcagcaggccggtacttccgttctggcgcaggctaaccaggtcccgcagaacgtgctgtctctgttagcgaaaggcactcgtacccgcggtaagctgtgcccggactgcctgaactgtaccgatctggatgttgcactgggtcgtccgatgtgcgttggtaccaccccgtctgcgaaagccagcatcctgcacgaagttcgcccggttacttccggttgtttcccgattatgcatgatcgtaccaaaattcgtcagctgccaaacctgctgcgtggctatgaaaacattcgtctgtccactcaaaacgtaatcgatgcagaaaaagcgctgggtggcccgtatcgtctgggtaccagcggctcctgcccgaacgcgacgagcaaaagcggcttcttcgccaccatggcttgggccgttccgaaagacaacaacaaaaacgctacgaacccgctgaccgtcgaagtcccgtacatctgcaccgaaggcgaagatcagatcactgtgtggggcttccacagcgatgataagacccagatgaaaaatctgtacggtgactccaacccgcagaaattcacctcttctgctaacggtgtaacgacccactacgtttctcagatcggtggtttcccggaccagacggaagatggcggtctgcctcagtccggccgcatcgtagttgattacatggtccagaaaccgggtaagactggtaccattgtttaccagcgtggtgtactgctgccgcagaaggtctggtgtgcttccggccgttccaaggtcattaagggctgatag

SEQ ID NO: 189 - DNA, 726 bp, Artificial Sequence
  HA1-2 (Lee)
aaaggcactcagacccgtggcaagctgtgtccgaactgtttcaactgcaccgatctggacgttgcactgggtcgtccgaaatgcatgggtaacatcccgtctgcgaaggtaagcatcctgcacgaagttaaaccggtaaccagcggctgtttcccgatcatgcacgacaaaactaaaattcgtcagctgccgaacctgctgcgtggttatgagaacattcgtctgtctacctctaatgttatcaacgcggagactgcaccaggtggcccatacaaagtaggtaccagcggttcctgtccgaacgttgcgaatcgtaacggcttcttcaacactatggcgtgggttatcccgaaagataacaataaaactgcaattaacccggtaactgtagaagttccgtacatctgctccgaaggcgaggaccagattacggtatggggctttcacagcgacgataaaacccagatggagcgtctgtacggtgactctaacccgcagaaattcacctcctccgcgaacggcgttaccacccactatgtttctcagatcggcggtttcccgaatcagaccgaagacgaaggcctgaagcagtccggccgtattgttgtagactacatggttcagaagccgggcaaaactggtaccattgtataccagcgcggcatcctgctgccgcagaaagtttggtgcgcttccggtcgtagcaaagtaatcaaaggttgatag

SEQ ID NO: 190 - DNA, 2244 bp, Artificial Sequence
  STF2.HA1-2 (Lee)
atggcacaagtaatcaacactaacagtctgtcgctgctgacccagaataacctgaacaaatcccagtccgcactgggcaccgctatcgagcgtctgtcttctggtctgcgtatcaacagcgcgaaagacgatgcggcaggtcaggcgattgctaaccgtttcaccgcgaacatcaaaggtctgactcaggcttcccgtaacgctaacgacggtatctccattgcgcagaccactgaaggcgcgctgaacgaaatcaacaacaacctgcagcgtgtgcgtgaactggcggttcagtctgctaacagcaccaactcccagtctgacctcgactccatccaggctgaaatcacccagcgcctgaacgaaatcgaccgtgtatccggccagactcagttcaacggcgtgaaagtcctggcgcaggacaacaccctgaccatccaggttggcgccaacgacggtgaaactatcgatatcgatctgaagcagatcaactctcagaccctgggtctggactcactgaacgtgcagaaagcgtatgatgtgaaagatacagcagtaacaacgaaagcttatgccaataatggtactacactggatgtatcgggtcttgatgatgcagctattaaagcggctacgggtggtacgaatggtacggcttctgtaaccggtggtgcggttaaatttgacgcagataataacaagtactttgttactattggtggctttactggtgctgatgccgccaaaaatggcgattatgaagttaacgttgctactgacggtacagtaacccttgcggctggcgcaactaaaaccacaatgcctgctggtgcgacaactaaaacagaagtacaggagttaaaagatacaccggcagttgtttcagcagatgctaaaaatgccttaattgctggcggcgttgacgctaccgatgctaatggcgctgagttggtcaaaatgtcttataccgataaaaatggtaagacaattgaaggcggttatgcgcttaaagctggcgataagtattacgccgcagattacgatgaagcgacaggagcaattaaagctaaaactacaagttatactgctgctgacggcactaccaaaacagcggctaaccaactgggtggcgtagacggtaaaaccgaagtcgttactatcgacggtaaaacctacaatgccagcaaagccgctggtcatgatttcaaagcacaaccagagctggcggaagcagccgctaaaaccaccgaaaacccgctgcagaaaattgatgccgcgctggcgcaggtggatgcgctgcgctctgatctgggtgcggtacaaaaccgtttcaactctgctatcaccaacctgggcaataccgtaaacaatctgtctgaagcgcgtagccgtatcgaagattccgactacgcgaccgaagtttccaacatgtctcgcgcgcagattctgcagcaggccggtacttccgttctggcgcaggctaaccaggtcccgcagaacgtgctgtctctgttagcgaaaggcactcagacccgtggcaagctgtgtccgaactgtttcaactgcaccgatctggacgttgcactgggtcgtccgaaatgcatgggtaacatcccgtctgcgaaggtaagcatcctgcacgaagttaaaccggtaaccagcggctgtttcccgatcatgcacgacaaaactaaaattcgtcagctgccgaacctgctgcgtggttatgagaacattcgtctgtctacctctaatgttatcaacgcggagactgcaccaggtggcccatacaaagtaggtaccagcggttcctgtccgaacgttgcgaatcgtaacggcttcttcaacactatggcgtgggttatcccgaaagataacaataaaactgcaattaacccggtaactgtagaagttccgtacatctgctccgaaggcgaggaccagattacggtatggggctttcacagcgacgataaaacccagatggagcgtctgtacggtgactctaacccgcagaaattcacctcctccgcgaacggcgttaccacccactatgtttctcagatcggcggtttcccgaatcagaccgaagacgaaggcctgaagcagtccggccgtattgttgtagactacatggttcagaagccgggcaaaactggtaccattgtataccagcgcggcatcctgctgccgcagaaagtttggtgcgcttccggtcgtagcaaagtaatcaaaggttgatag

SEQ ID NO: 191 - DNA, 729 bp, Artificial Sequence
  HA1-2 (Ohio)
aaaggcactaaaacccgtggcaagctgtgtccgaagtgtctgaactgcaccgatctggacgtcgcactgggtcgtccgaaatgtactggtaacattccgtccgcggaagtctccatcctgcatgaagtgcgtccagtgacctccggctgttttccgattatgcatgatcgtactaaaatccgtcagctgccgaacctgctgcgtggttacgaacacattcgtctgtccacccataacgttatcaacgcggaaaaggcgccgggcggtccctataaaatcggtacctctggttcttgcccgaacgtgactaacggtaacggcttctttgcaaccatggcctgggcggtcccgaaaaacgacaacaacaagaccgcgaccaattccctgaccatcgaagtcccgtatatctgcaccgaaggtgaagatcaaatcacgatttggggcttccactccgacagcgagacacaaatggcgaaactgtacggtgacagcaaaccgcaaaaattcactagctccgctaacggtgttaccacccactacgtttcccagatcggtggtttcccaaaccagaccgaagatggtggtctgccgcagtccggtcgcatcgttgtagattatatggtgcagaaaagcggtaaaaccggtaccatcacctaccagcgtggcatcctgctgccgcagaaagtttggtgcgcttccggtcgtagcaaagtaatcaaaggttgatag

SEQ ID NO: 192 - DNA, 2247 bp, Artificial Sequence
  STF2.HA1-2 (Ohio)
atggcacaagtaatcaacactaacagtctgtcgctgctgacccagaataacctgaacaaatcccagtccgcactgggcaccgctatcgagcgtctgtcttctggtctgcgtatcaacagcgcgaaagacgatgcggcaggtcaggcgattgctaaccgtttcaccgcgaacatcaaaggtctgactcaggcttcccgtaacgctaacgacggtatctccattgcgcagaccactgaaggcgcgctgaacgaaatcaacaacaacctgcagcgtgtgcgtgaactggcggttcagtctgctaacagcaccaactcccagtctgacctcgactccatccaggctgaaatcacccagcgcctgaacgaaatcgaccgtgtatccggccagactcagttcaacggcgtgaaagtcctggcgcaggacaacaccctgaccatccaggttggcgccaacgacggtgaaactatcgatatcgatctgaagcagatcaactctcagaccctgggtctggactcactgaacgtgcagaaagcgtatgatgtgaaagatacagcagtaacaacgaaagcttatgccaataatggtactacactggatgtatcgggtcttgatgatgcagctattaaagcggctacgggtggtacgaatggtacggcttctgtaaccggtggtgcggttaaatttgacgcagataataacaagtactttgttactattggtggctttactggtgctgatgccgccaaaaatggcgattatgaagttaacgttgctactgacggtacagtaacccttgcggctggcgcaactaaaaccacaatgcctgctggtgcgacaactaaaacagaagtacaggagttaaaagatacaccggcagttgtttcagcagatgctaaaaatgccttaattgctggcggcgttgacgctaccgatgctaatggcgctgagttggtcaaaatgtcttataccgataaaaatggtaagacaattgaaggcggttatgcgcttaaagctggcgataagtattacgccgcagattacgatgaagcgacaggagcaattaaagctaaaactacaagttatactgctgctgacggcactaccaaaacagcggctaaccaactgggtggcgtagacggtaaaaccgaagtcgttactatcgacggtaaaacctacaatgccagcaaagccgctggtcatgatttcaaagcacaaccagagctggcggaagcagccgctaaaaccaccgaaaacccgctgcagaaaattgatgccgcgctggcgcaggtggatgcgctgcgctctgatctgggtgcggtacaaaaccgtttcaactctgctatcaccaacctgggcaataccgtaaacaatctgtctgaagcgcgtagccgtatcgaagattccgactacgcgaccgaagtttccaacatgtctcgcgcgcagattctgcagcaggccggtacttccgttctggcgcaggctaaccaggtcccgcagaacgtgctgtctctgttagcgaaaggcactaaaacccgtggcaagctgtgtccgaagtgtctgaactgcaccgatctggacgtcgcactgggtcgtccgaaatgtactggtaacattccgtccgcggaagtctccatcctgcatgaagtgcgtccagtgacctccggctgttttccgattatgcatgatcgtactaaaatccgtcagctgccgaacctgctgcgtggttacgaacacattcgtctgtccacccataacgttatcaacgcggaaaaggcgccgggcggtccctataaaatcggtacctctggttcttgcccgaacgtgactaacggtaacggcttctttgcaaccatggcctgggcggtcccgaaaaacgacaacaacaagaccgcgaccaattccctgaccatcgaagtcccgtatatctgcaccgaaggtgaagatcaaatcacgatttggggcttccactccgacagcgagacacaaatggcgaaactgtacggtgacagcaaaccgcaaaaattcactagctccgctaacggtgttaccacccactacgtttcccagatcggtggtttcccaaaccagaccgaagatggtggtctgccgcagtccggtcgcatcgttgtagattatatggtgcagaaaagcggtaaaaccggtaccatcacctaccagcgtggcatcctgctgccgcagaaagtttggtgcgcttccggtcgtagcaaagtaatcaaaggttgatag

SEQ ID NO: 193 - DNA, 21 bp, Artificial Sequence
  FOR PRIMER
cggataacaattcccctctag

SEQ ID NO: 194 - DNA, 50 bp, Artificial Sequence
  REV PRIMER
cgaagtgagatttggttggagtagtggtcgctaacagagacagcacgttc

SEQ ID NO: 195 - DNA, 50 bp, Artificial Sequence
  FOR PRIMER
cccgcagaacgtgctgtctctgttagcgaccactaccccaaccaaatctc

SEQ ID NO: 196 - DNA, 20 bp, Artificial Sequence
  REV PRIMER
ctatttcacccaaattggac

SEQ ID NO: 197 - DNA, 51 bp, Artificial Sequence
  REV PRIMER
cacagcttgccacgggtttcagtgcctttcgctaacagagacagcacgttc

SEQ ID NO: 198 - DNA, 49 bp, Artificial Sequence
  FOR PRIMER
cccgcagaacgtgctgtctctgttagcgaaaggcactgaaacccgtggc

SEQ ID NO: 199 - DNA, 44 bp, Artificial Sequence
  REV PRIMER
gactagacgctcagctatcaacctttgattactttgctacgacc

SEQ ID NO: 200 - DNA, 51 bp, Artificial Sequence
  REV PRIMER
cacagcttaccgcgggtacgagtgcctttcgctaacagagacagcacgttc

SEQ ID NO: 201 - DNA, 32 bp, Artificial Sequence
  FOR PRIMER
cgggatccaaaggcactcgtacccgcggtaag

SEQ ID NO: 202 - DNA, 44 bp, Artificial Sequence
  REV PRIMER
gactagacgctcagctatcagcccttaatgaccttggaacggcc

SEQ ID NO: 203 - DNA, 52 bp, Artificial Sequence
  REV PRIMER
gcatagttttcctctggtctgtgttcctttcgctaacagagacagcacgttc

SEQ ID NO: 204 - DNA, 20 bp, Artificial Sequence
  FOR PRIMER
aaaggaacacagaccagagg

SEQ ID NO: 205 - DNA, 26 bp, Artificial Sequence
  REV PRIMER
ctactacccttttattaccttgctcc

SEQ ID NO: 206 - DNA, 51 bp, Artificial Sequence
  REV PRIMER
cacagcttgccacgggttttagtgcctttcgctaacagagacagcacgttc

SEQ ID NO: 207 - DNA, 21 bp, Artificial Sequence
  FOR PRIMER
aaaggcactaaaacccgtggc

SEQ ID NO: 208 - DNA, 44 bp, Artificial Sequence; identical to SEQ ID NO: 199
  REV PRIMER

SEQ ID NO: 209 - protein, 800 aa, Artificial Sequence
  STF2.HA1-1 (MAL)
MAQVINTNSLSLLTQNNLNKSQSALGTAIERLSSGLRINSAKDDAAGQAIANRFTANIKGLTQASRNANDGISIAQTTEGALNEINNNLQRVRELAVQSANSTNSQSDLDSIQAEITQRLNEIDRVSGQTQFNGVKVLAQDNTLTIQVGANDGETIDIDLKQINSQTLGLDSLNVQKAYDVKDTAVTTKAYANNGTTLDVSGLDDAAIKAATGGTNGTASVTGGAVKFDADNNKYFVTIGGFTGADAAKNGDYEVNVATDGTVTLAAGATKTTMPAGATTKTEVQELKDTPAVVSADAKNALIAGGVDATDANGAELVKMSYTDKNGKTIEGGYALKAGDKYYAADYDEATGAIKAKTTSYTAADGTTKTAANQLGGVDGKTEVVTIDGKTYNASKAAGHDFKAQPELAEAAAKTTENPLQKIDAALAQVDALRSDLGAVQNRFNSAITNLGNTVNNLSEARSRIEDSDYATEVSNMSRAQILQQAGTSVLAQANQVPQNVLSLLATTTPTKSHFANLKGTETRGKLCPKCLNCTDLDVALGRPKCTGNIPSARVSILHEVRPVTSGCFPIMHDRTKIRQLPNLLRGYEHIRLSTHNVINAENAPGGSYKIGTSGSCPNVTNGNGFFATMAWAVPKNDNNKTATNSLTIEVPYICTEGEDQITVWGFHSDNEAQMAKLYGDSKPQKFTSSANGVTTHYVSQIGGFPNQTEDGGLPQSGRIVVDYMVQKSGKTGTITYQRGILLPQKVWCASGRSKVIKGSLPLIGEADCLHEKYGGLNKSKPYYTGEHAKAIGNCPIWVK

SEQ ID NO: 210 - protein, 747 aa, Artificial Sequence
  STF2.HA1-2 (MAL)
MAQVINTNSLSLLTQNNLNKSQSALGTAIERLSSGLRINSAKDDAAGQAIANRFTANIKGLTQASRNANDGISIAQTTEGALNEINNNLQRVRELAVQSANSTNSQSDLDSIQAEITQRLNEIDRVSGQTQFNGVKVLAQDNTLTIQVGANDGETIDIDLKQINSQTLGLDSLNVQKAYDVKDTAVTTKAYANNGTTLDVSGLDDAAIKAATGGTNGTASVTGGAVKFDADNNKYFVTIGGFTGADAAKNGDYEVNVATDGTVTLAAGATKTTMPAGATTKTEVQELKDTPAVVSADAKNALIAGGVDATDANGAELVKMSYTDKNGKTIEGGYALKAGDKYYAADYDEATGAIKAKTTSYTAADGTTKTAANQLGGVDGKTEVVTIDGKTYNASKAAGHDFKAQPELAEAAAKTTENPLQKIDAALAQVDALRSDLGAVQNRFNSAITNLGNTVNNLSEARSRIEDSDYATEVSNMSRAQILQQAGTSVLAQANQVPQNVLSLLAKGTETRGKLCPKCLNCTDLDVALGRPKCTGNIPSARVSILHEVRPVTSGCFPIMHDRTKIRQLPNLLRGYEHIRLSTHNVINAENAPGGSYKIGTSGSCPNVTNGNGFFATMAWAVPKNDNNKTATNSLTIEVPYICTEGEDQITVWGFHSDNEAQMAKLYGDSKPQKFTSSANGVTTHYVSQIGGFPNQTEDGGLPQSGRIVVDYMVQKSGKTGTITYQRGILLPQKVWCASGRSKVIKG

SEQ ID NO: 211 - protein, 746 aa, Artificial Sequence
  STF2.HA1-2 (SH)
MAQVINTNSLSLLTQNNLNKSQSALGTAIERLSSGLRINSAKDDAAGQAIANRFTANIKGLTQASRNANDGISIAQTTEGALNEINNNLQRVRELAVQSANSTNSQSDLDSIQAEITQRLNEIDRVSGQTQFNGVKVLAQDNTLTIQVGANDGETIDIDLKQINSQTLGLDSLNVQKAYDVKDTAVTTKAYANNGTTLDVSGLDDAAIKAATGGTNGTASVTGGAVKFDADNNKYFVTIGGFTGADAAKNGDYEVNVATDGTVTLAAGATKTTMPAGATTKTEVQELKDTPAVVSADAKNALIAGGVDATDANGAELVKMSYTDKNGKTIEGGYALKAGDKYYAADYDEATGAIKAKTTSYTAADGTTKTAANQLGGVDGKTEVVTIDGKTYNASKAAGHDFKAQPELAEAAAKTTENPLQKIDAALAQVDALRSDLGAVQNRFNSAITNLGNTVNNLSEARSRIEDSDYATEVSNMSRAQILQQAGTSVLAQANQVPQNVLSLLAKGTRTRGKLCPDCLNCTDLDVALGRPMCVGTTPSAKASILHEVRPVTSGCFPIMHDRTKIRQLPNLLRGYENIRLSTQNVIDAEKALGGPYRLGTSGSCPNATSKSGFFATMAWAVPKDNNKNATNPLTVEVPYICTEGEDQITVWGFHSDDKTQMKNLYGDSNPQKFTSSANGVTTHYVSQIGGFPDQTEDGGLPQSGRIVVDYMVQKPGKTGTIVYQRGVLLPQKVWCASGRSKVIKG

SEQ ID NO: 212 - protein, 1518 aa, Artificial Sequence
  STF2
ATGGCACAAGTAATCAACACTAACAGTCTGTCGCTGCTGACCCAGAATAACCTGAACAAATCCCAGTCCGCACTGGGCACCGCTATCGAGCGTCTGTCTTCTGGTCTGCGTATCAACAGCGCGAAAGACGATGCGGCAGGTCAGGCGATTGCTAACCGTTTCACCGCGAACATCAAAGGTCTGACTCAGGCTTCCCGTAACGCTAACGACGGTATCTCCATTGCGCAGACCACTGAAGGCGCGCTGAACGAAATCAACAACAACCTGCAGCGTGTGCGTGAACTGGCGGTTCAGTCTGCTAACAGCACCAACTCCCAGTCTGACCTCGACTCCATCCAGGCTGAAATCACCCAGCGCCTGAACGAAATCGACCGTGTATCCGGCCAGACTCAGTTCAACGGCGTGAAAGTCCTGGCGCAGGACAACACCCTGACCATCCAGGTTGGCGCCAACGACGGTGAAACTATCGATATCGATCTGAAGCAGATCAACTCTCAGACCCTGGGTCTGGACTCACTGAACGTGCAGAAAGCGTATGATGTGAAAGATACAGCAGTAACAACGAAAGCTTATGCCAATAATGGTACTACACTGGATGTATCGGGTCTTGATGATGCAGCTATTAAAGCGGCTACGGGTGGTACGAATGGTACGGCTTCTGTAACCGGTGGTGCGGTTAAATTTGACGCAGATAATAACAAGTACTTTGTTACTATTGGTGGCTTTACTGGTGCTGATGCCGCCAAAAATGGCGATTATGAAGTTAACGTTGCTACTGACGGTACAGTAACCCTTGCGGCTGGCGCAACTAAAACCACAATGCCTGCTGGTGCGACAACTAAAACAGAAGTACAGGAGTTAAAAGATACACCGGCAGTTGTTTCAGCAGATGCTAAAAATGCCTTAATTGCTGGCGGCGTTGACGCTACCGATGCTAATGGCGCTGAGTTGGTCAAAATGTCTTATACCGATAAAAATGGTAAGACAATTGAAGGCGGTTATGCGCTTAAAGCTGGCGATAAGTATTACGCCGCAGATTACGATGAAGCGACAGGAGCAATTAAAGCTAAAACTACAAGTTATACTGCTGCTGACGGCACTACCAAAACAGCGGCTAACCAACTGGGTGGCGTAGACGGTAAAACCGAAGTCGTTACTATCGACGGTAAAACCTACAATGCCAGCAAAGCCGCTGGTCATGATTTCAAAGCACAACCAGAGCTGGCGGAAGCAGCCGCTAAAACCACCGAAAACCCGCTGCAGAAAATTGATGCCGCGCTGGCGCAGGTGGATGCGCTGCGCTCTGATCTGGGTGCGGTACAAAACCGTTTCAACTCTGCTATCACCAACCTGGGCAATACCGTAAACAATCTGTCTGAAGCGCGTAGCCGTATCGAAGATTCCGACTACGCGACCGAAGTTTCCAACATGTCTCGCGCGCAGATTCTGCAGCAGGCCGGTACTTCCGTTCTGGCGCAGGCTAACCAGGTCCCGCAGAACGTGCTGTCTCTGTTACGT

SEQ ID NO: 213 - protein, 583 aa, Influenza B/Yamagata/16/18 HA
MKAIIVLLMVVTSNADRICTGITSSNSPHVVKTATQGEVNVTGVIPLTTTPTKSHFANLKGTKTRGKLCPNCLNCTDLDVALGRPMCMGTIPSAKASILHEVRPVTSGCFPIMHDRTKIRQLPNLLRGYENIRLSTHNVINAERAPGGPYRLGTSGSCPNVTSRNGFFATMAWAVPRDNKTATNPLTVEVPYICTKGEDQITVWGFHSDDKTQMKNLYGDSNPQKFTSSANGVTTHYVSQIGDFPNQTEDGGLPQSGRIVVDYMVQKPGKTGTIVYQRGVLLPQKVWCASGRSKVIKGSLPLIGEADCLHEKYGGLNKSKPYYTGEHAKAIGNCPIWVKTPLKLANGTKYRPPAKLLKERGFFGAIAGFLEGGWEGMIAGWHGYTSHGAHGVAVAADLKSTQEAINKITKNLNSLSELEVKNLQRLSGAMDELHNEILELDEKVDDLRADTISSQIELAVLLSNEGIINSEDEHLLALERKLKKMLGPSAVDIGNGCFETKHKCNQTCLDRIAAGTFNAGEFSLPTFDSLNITAASLNDDGLDNHTILLYYSTAASSLAVTLMIAIFIVYMVSRDNVSCSICL

SEQ ID NO: 214 - protein, 6 aa, Artificial Sequence
  PR/8 HA Peptide
THSVNL

SEQ ID NO: 215 - protein, 6 aa, Artificial Sequence
  PR/8 HA Peptide
SHNGKL

SEQ ID NO: 216 - protein, 4 aa, Artificial Sequence
  PR/8 HA Peptide
CRLK

SEQ ID NO: 217 - protein, 4 aa, Artificial Sequence
  PR/8 HA Peptide
PYQN

SEQ ID NO: 218 - protein, 4 aa, Artificial Sequence
  PR/8 HA Peptide
PKYV

SEQ ID NO: 219 - protein, 4 aa, Artificial Sequence
  PR/8 HA Peptide
RSAK

SEQ ID NO: 220 - protein, 6 aa, Artificial Sequence
  PR/8 HA Peptide
NASMHE

SEQ ID NO: 221 - protein, 6 aa, Artificial Sequence
  PR/8 HA Peptide
APLQLG

SEQ ID NO: 222 - protein, 5 aa, Artificial Sequence
  PR/8 HA Peptide
GIITS

SEQ ID NO: 223 - protein, 4 aa, Artificial Sequence
  PR/8 HA Peptide
CNTK

SEQ ID NO: 224 - protein, 6 aa, Artificial Sequence
  PR/8 HA Peptide
SYIVET

SEQ ID NO: 225 - protein, 8 aa, Artificial Sequence
  PR/8 HA Peptide
NIAGWLLG

SEQ ID NO: 226 - protein, 5 aa, Artificial Sequence
  PR/8 HA Peptide
PGDFI

SEQ ID NO: 227 - protein, 8 aa, Artificial Sequence
  PR/8 HA Peptide
NSENGICY

SEQ ID NO: 228 - protein, 8 aa, Artificial Sequence
  PR/8 HA Peptide
AFALSRGF

SEQ ID NO: 229 - protein, 7 aa, Artificial Sequence
  PR/8 HA Peptide
AFALSRG

SEQ ID NO: 230 - protein, 6 aa, Artificial Sequence
  VN04 HA peptide
THAQDI

SEQ ID NO: 231 - protein, 6 aa, Artificial Sequence
  VN04 HA peptide
EKKHNG

SEQ ID NO: 232 - protein, 6 aa, Artificial Sequence
  VN04 HA peptide
KLCDLD

SEQ ID NO: 233 - protein, 4 aa, Artificial Sequence
  VN04 HA peptide
KSNR

SEQ ID NO: 234 - protein, 4 aa, Artificial Sequence
  VN04 HA peptide
PKYV

SEQ ID NO: 235 - protein, 6 aa, Artificial Sequence
  VN04 HA peptide
LVLATG

SEQ ID NO: 236 - protein, 5 aa, Artificial Sequence
  VN04 HA peptide
KPLIL

SEQ ID NO: 237 - protein, 5 aa, Artificial Sequence
  VN04 HA peptide
TIMKS

SEQ ID NO: 238 - protein, 5 aa, Artificial Sequence
  VN04 HA peptide
YGNCN

SEQ ID NO: 239 - protein, 6 aa, Artificial Sequence
  VN04 HA peptide
SYIVEK

SEQ ID NO: 240 - protein, 5 aa, Artificial Sequence
  VN04 HA peptide
PGDFN

SEQ ID NO: 241 - protein, 4 aa, Artificial Sequence
  VN04 HA peptide
KGDS

SEQ ID NO: 242 - protein, 8 aa, Artificial Sequence
  VN04 HA peptide
EYAYKIVK

SEQ ID NO: 243 - protein, 6 aa, Artificial Sequence
  IND05 HA peptide
THAQDI

SEQ ID NO: 244 - protein, 6 aa, Artificial Sequence
  IND05 HA peptide
EKTHNG

SEQ ID NO: 245 - protein, 6 aa, Artificial Sequence
  IND05 HA peptide
KLCDLD

SEQ ID NO: 246 - protein, 4 aa, Artificial Sequence
  IND05 HA peptide
KSNR

SEQ ID NO: 247 - protein, 4 aa, Artificial Sequence
  IND05 HA peptide
PKYV

SEQ ID NO: 248 - protein, 6 aa, Artificial Sequence
  IND05 HA peptide
LVLATG

SEQ ID NO: 249 - protein, 5 aa, Artificial Sequence
  IND05 HA peptide
KPLIL

SEQ ID NO: 250 - protein, 5 aa, Artificial Sequence
  IND05 HA peptide
AIMKS

SEQ ID NO: 251 - protein, 5 aa, Artificial Sequence
  IND05 HA peptide
YGNCN

SEQ ID NO: 252 - protein, 6 aa, Artificial Sequence
  IND05 HA peptide
SYIVEK

SEQ ID NO: 253 - protein, 5 aa, Artificial Sequence
  IND05 HA peptide
PGSFN

SEQ ID NO: 254 - protein, 8 aa, Artificial Sequence
  IND05 HA peptide
EYAYKIVK

SEQ ID NO: 255 - protein, 9 aa, Artificial Sequence
  New Caledonia HA peptide
THSVNLLED

SEQ ID NO: 256 - protein, 6 aa, Artificial Sequence
  New Caledonia HA peptide
SHNGKL

SEQ ID NO: 257 - protein, 6 aa, Artificial Sequence
  New Caledonia HA peptide
APLQLG

SEQ ID NO: 258 - protein, 4 aa, Artificial Sequence
  New Caledonia HA peptide
RSAK

SEQ ID NO: 259 - protein, 4 aa, Artificial Sequence
  New Caledonia HA peptide
PKYV

SEQ ID NO: 260 - protein, 6 aa, Artificial Sequence
  New Caledonia HA peptide
LRMVTG

SEQ ID NO: 261 - protein, 12 aa, Artificial Sequence
  New Caledonia HA peptide
SHNGKLCLLKGI

SEQ ID NO: 262 - protein, 6 aa, Artificial Sequence
  New Caledonia HA peptide
SGIITS

SEQ ID NO: 263 - protein, 9 aa, Artificial Sequence
  New Caledonia HA peptide
NAPMDECDA

SEQ ID NO: 264 - protein, 6 aa, Artificial Sequence
  New Caledonia HA peptide
SYIVET

SEQ ID NO: 265 - protein, 5 aa, Artificial Sequence
  New Caledonia HA peptide
PGYFA

SEQ ID NO: 266 - protein, 9 aa, Artificial Sequence
  New Caledonia HA peptide
YAFALSRGF

SEQ ID NO: 267 - protein, 5 aa, Artificial Sequence
  A/Wisconsin/67/2005 HA Peptide
TNATE

SEQ ID NO: 268 - protein, 5 aa, Artificial Sequence
  A/Wisconsin/67/2005 HA Peptide
PRYVK

SEQ ID NO: 269 - protein, 5 aa, Artificial Sequence
  A/Wisconsin/67/2005 HA Peptide
PFQNV

SEQ ID NO: 270 - protein, 6 aa, Artificial Sequence
  A/Wisconsin/67/2005 HA Peptide
QILDGE

SEQ ID NO: 271 - protein, 5 aa, Artificial Sequence
  A/Wisconsin/67/2005 HA Peptide
GGICD

SEQ ID NO: 272 - protein, 6 aa, Artificial Sequence
  A/Wisconsin/67/2005 HA Peptide
SSIMRS

SEQ ID NO: 273 - protein, 5 aa, Artificial Sequence
  A/Wisconsin/67/2005 HA Peptide
APIGK

SEQ ID NO: 274 - protein, 5 aa, Artificial Sequence
  A/Wisconsin/67/2005 HA Peptide
LFVER

SEQ ID NO: 275 - protein, 8 aa, Artificial Sequence
  A/Wisconsin/67/2005 HA Peptide
TLIDALLG

SEQ ID NO: 276 - protein, 6 aa, Artificial Sequence
  A/Wisconsin/67/2005 HA Peptide
RGYFKI

SEQ ID NO: 277 - protein, 8 aa, Artificial Sequence
  PR/8 HA1-3mut peptide
NSENEICY

SEQ ID NO: 278 - protein, 8 aa, Artificial Sequence
  PR/8 HA1-3mut peptide
KEELREQL

SEQ ID NO: 279 - protein, 6 aa, Artificial Sequence
  B/Lee/40 HA1-1 peptide
TTTPTK

SEQ ID NO: 280 - protein, 6 aa, Artificial Sequence
  B/Lee/40 HA1-1 peptide
CPIWVK

SEQ ID NO: 281 - protein, 6 aa, Artificial Sequence
  B/Lee/40 HA1-2 peptide
KGTQTR

SEQ ID NO: 282 - protein, 6 aa, Artificial Sequence
  B/Lee/40 HA1-2 peptide
SKVIKG

SEQ ID NO: 283 - protein, 6 aa, Artificial Sequence
  A/Aichi/2/68 HA1-1 peptide
QSSSTG

SEQ ID NO: 284 - protein, 6 aa, Artificial Sequence
  A/Aichi/2/68 HA1-1 peptide
CPKYVK

SEQ ID NO: 285 - protein, 6 aa, Artificial Sequence
  A/Aichi/2/68 HA1-2 peptide
HRILDG

SEQ ID NO: 286 - protein, 6 aa, Artificial Sequence
  A/Aichi/2/68 HA1-2 peptide
SIMRSD

SEQ ID NO: 287 - protein, 6 aa, Artificial Sequence
  B/Malaysia/2506/2004 HA1-1 peptide
TTTPTK

SEQ ID NO: 288 - protein, 6 aa, Artificial Sequence
  B/Malaysia/2506/2004 HA1-1 peptide
CPIWVK

SEQ ID NO: 289 - protein, 6 aa, Artificial Sequence
  B/Malaysia/2506/2004 HA1-2 peptide
KGTETR

SEQ ID NO: 290 - protein, 6 aa, Artificial Sequence
  B/Malaysia/2506/2004 HA1-2 peptide
SKVIKG

SEQ ID NO: 291 - protein, 6 aa, Artificial Sequence
  B/Ohio/1/2005 HA1-1 peptide
TTTPTK

SEQ ID NO: 292 - protein, 6 aa, Artificial Sequence
  B/Ohio/1/2005 HA1-1 peptide
CPIWVK

SEQ ID NO: 293 - protein, 6 aa, Artificial Sequence
  B/Ohio/1/2005 HA1-2 peptide
KGTKTR

SEQ ID NO: 294 - protein, 6 aa, Artificial Sequence
  B/Ohio/1/2005 HA1-2 peptide
SKVIKG

SEQ ID NO: 295 - protein, 6 aa, Artificial Sequence
  B/Shanghai/361/2002 HA1-1 peptide
TTTPIK

SEQ ID NO: 296 - protein, 6 aa, Artificial Sequence
  B/Shanghai/361/2002 HA1-1 peptide
CPIWVK

SEQ ID NO: 297 - protein, 6 aa, Artificial Sequence
  B/Shanghai/361/2002 HA1-2 peptide
KGTRTR

SEQ ID NO: 298 - protein, 6 aa, Artificial Sequence
  B/Shanghai/361/2002 HA1-2 peptide
SKVIKG

SEQ ID NO: 299 - protein, 4 aa, Artificial Sequence
  B/Lee/40 HA peptide
TGVI

SEQ ID NO: 300 - protein, 4 aa, Artificial Sequence
  B/Lee/40 HA peptide
TTTP

SEQ ID NO: 301 - protein, 4 aa, Artificial Sequence
  B/Lee/40 HA peptide
PIWV

SEQ ID NO: 302 - protein, 5 aa, Artificial Sequence
  B/Lee/40 HA peptide
PYYTG

SEQ ID NO: 303 - protein, 5 aa, Artificial Sequence
  B/Lee/40 HA peptide
DCLHE

SEQ ID NO: 304 - protein, 5 aa, Artificial Sequence
  B/Lee/40 HA peptide
YGGLN

SEQ ID NO: 305 - protein, 5 aa, Artificial Sequence
  B/Lee/40 HA peptide
KAIGN

SEQ ID NO: 306 - protein, 5 aa, Artificial Sequence
  B/Lee/40 HA peptide
TQTRG

SEQ ID NO: 307 - protein, 5 aa, Artificial Sequence
  B/Lee/40 HA peptide
KVIKG

SEQ ID NO: 308 - protein, 5 aa, Artificial Sequence
  B/Lee/40 HA peptide
DCLHE

SEQ ID NO: 309 - protein, 6 aa, Artificial Sequence
  B/Lee/40 HA peptide
SILHEV

SEQ ID NO: 310 - DNA, 18 bp, Artificial Sequence
  STF2
gtgctgagcctgttacgt

SEQ ID NO: 311 - protein, 7 aa, Artificial Sequence
  linker
SGSGSGS

SEQ ID NO: 312 - protein, 506 aa, S. typhimurium
MAQVINTNSLSLLTQNNLNKSQSALGTAIERLSSGLRINSAKDDAAGQAIANRFTANIKGLTQASRNANDGISIAQTTEGALNEINNNLQRVRELAVQSANSTNSQSDLDSIQAEITQRLNEIDRVSGQTQFNGVKVLAQDNTLTIQVGANDGETIDIDLKQINSQTLGLDSLNVQKAYDVKDTAVTTKAYANNGTTLDVSGLDDAAIKAATGGTNGTASVTGGAVKFDADNNKYFVTIGGFTGADAAKNGDYEVNVATDGTVTLAAGATKTTMPAGATTKTEVQELKDTPAVVSADAKNALIAGGVDATDANGAELVKMSYTDKNGKTIEGGYALKAGDKYYAADYDEATGAIKAKTTSYTAADGTTKTAANQLGGVDGKTEVVTIDGKTYNASKAAGHDFKAQPELAEAAAKTTENPLQKIDAALAQVDALRSDLGAVQNRFNSAITNLGNTVNNLSEARSRIEDSDYATEVSNMSRAQILQQAGTSVLAQANQVPQNVLSLLR

SEQ ID NO: 313 - protein, 277 aa, Artificial Sequence
  STF2delta
MAQVINTNSLSLLTQNNLNKSQSALGTAIERLSSGLRINSAKDDAAGQAIANRFTANIKGLTQASRNANDGISIAQTTEGALNEINNNLQRVRELAVQSANSTNSQSDLDSIQAEITQRLNEIDRVSGQTQFNGVKVLAQDNTLTIQVGANDGETIDIDLKQINSQTLGLDSLNVHGAPVDPASPWTENPLQKIDAALAQVDALRSDLGAVQNRFNSAITNLGNTVNNLSEARSRIEDSDYATEVSNMSRAQILQQAGTSVLAQANQVPQNVLSLLR

SEQ ID NO: 314 - DNA, 831 bp, Artificial Sequence
  STF2delta
atggcacaagtaatcaacactaacagtctgtcgctgctgacccagaataacctgaacaaatcccagtccgcactgggcaccgctatcgagcgtctgtcttctggtctgcgtatcaacagcgcgaaagacgatgcggcaggtcaggcgattgctaaccgtttcaccgcgaacatcaaaggtctgactcaggcttcccgtaacgctaacgacggtatctccattgcgcagaccactgaaggcgcgctgaacgaaatcaacaacaacctgcagcgtgtgcgtgaactggcggttcagtctgctaacagcaccaactcccagtctgacctcgactccatccaggctgaaatcacccagcgcctgaacgaaatcgaccgtgtatccggccagactcagttcaacggcgtgaaagtcctggcgcaggacaacaccctgaccatccaggttggcgccaacgacggtgaaactatcgatatcgatctgaagcagatcaactctcagaccctgggtctggactcactgaacgtgcatggagcgccggtggatcctgctagcccatggaccgaaaacccgctgcagaaaattgatgccgcgctggcgcaggtggatgcgctgcgctctgatctgggtgcggtacaaaaccgtttcaactctgctatcaccaacctgggcaataccgtaaacaatctgtctgaagcgcgtagccgtatcgaagattccgactacgcgaccgaagtttccaacatgtctcgcgcgcagattttgcagcaggccggtacttccgttctggcgcaggctaaccaggtcccgcagaacgtgctgtctctgttacgt

SEQ ID NO: 315 - DNA, 1518 bp, S. typhimurium; identical to SEQ ID NO: 178

SEQ ID NO: 316 - DNA, 2763 bp, Artificial Sequence
  STF2.OVA
atggcacaagtaatcaacactaacagtctgtcgctgctgacccagaataacctgaacaaatcccagtccgcactgggcaccgctatcgagcgtctgtcttctggtctgcgtatcaacagcgcgaaagacgatgcggcaggtcaggcgattgctaaccgtttcaccgcgaacatcaaaggtctgactcaggcttcccgtaacgctaacgacggtatctccattgcgcagaccactgaaggcgcgctgaacgaaatcaacaacaacctgcagcgtgtgcgtgaactggcggttcagtctgctaacagcaccaactcccagtctgacctcgactccatccaggctgaaatcacccagcgcctgaacgaaatcgaccgtgtatccggccagactcagttcaacggcgtgaaagtcctggcgcaggacaacaccctgaccatccaggttggcgccaacgacggtgaaactatcgatatcgatctgaagcagatcaactctcagaccctgggtctggactcactgaacgtgcagaaagcgtatgatgtgaaagatacagcagtaacaacgaaagcttatgccaataatggtactacactggatgtatcgggtcttgatgatgcagctattaaagcggctacgggtggtacgaatggtacggcttctgtaaccggtggtgcggttaaatttgacgcagataataacaagtactttgttactattggtggctttactggtgctgatgccgccaaaaatggcgattatgaagttaacgttgctactgacggtacagtaacccttgcggctggcgcaactaaaaccacaatgcctgctggtgcgacaactaaaacagaagtacaggagttaaaagatacaccggcagttgtttcagcagatgctaaaaatgccttaattgctggcggcgttgacgctaccgatgctaatggcgctgagttggtcaaaatgtcttataccgataaaaatggtaagacaattgaaggcggttatgcgcttaaagctggcgataagtattacgccgcagattacgatgaagcgacaggagcaattaaagctaaaaccacaagttatactgctgctgacggcactaccaaaacagcggctaaccaactgggtggcgtagacggtaaaaccgaagtcgttactatcgacggtaaaacctacaatgccagcaaagccgctggtcatgatttcaaagcacaaccagagctggcggaagcagccgctaaaaccaccgaaaacccgctgcagaaaattgatgccgcgctggcgcaggtggatgcgctgcgctctgatctgggtgcggtacaaaaccgtttcaactctgctatcaccaacctgggcaataccgtaaacaatctgtctgaagcgcgtagccgtatcgaagattccgactacgcgaccgaagtttccaacatgtctcgcgcgcagattttgcagcaggccggtacttccgttctggcgcaggctaaccaggtcccgcagaacgtgctgtctctgttacgtctcgagggctccatcggcgcagcaagcatggaattttgttttgatgtattcaaggagctcaaagtccaccatgccaatgagaacatcttctactgccccattgccatcatgtcagctctagccatggtatacctgggtgcaaaagacagcaccaggacacaaataaataaggttgttcgctttgataaacttccaggattcggagacagtattgaagctcagtgtggcacatctgtaaacgttcactcttcacttagagacatcctcaaccaaatcaccaaaccaaatgatgtttattcgttcagccttgccagtagactttatgctgaagagagatacccaatcctgccagaatacttgcagtgtgtgaaggaactgtatagaggaggcttggaacctatcaactttcaaacagctgcagatcaagccagagagctcatcaattcctgggtagaaagtcagacaaatggaattatcagaaatgtccttcagccaagctccgtggattctcaaactgcaatggttctggttaatgccattgtcttcaaaggactgtgggagaaagcatttaaggatgaagacacacaagcaatgcctttcagagtgactgagcaagaaagcaaacctgtgcagatgatgtaccagattggtttatttagagtggcatcaatggcttctgagaaaatgaagatcctggagcttccatttgccagtgggacaatgagcatgttggtgctgttgcctgatgaagtctcaggccttgagcagcttgagagtataatcaactttgaaaaactgactgaatggaccagttctaatgttatggaagagaggaagatcaaagtgtacttacctcgcatgaagatggaggaaaaatacaacctcacatctgtcttaatggctatgggcattactgacgtgtttagctcttcagccaatctgtctggcatctcctcagcagagagcctgaagatatctcaagctgtccatgcagcacatgcagaaatcaatgaagcaggcagagaggtggtagggtcagcagaggctggagtggatgctgcaagcgtctctgaagaatttagggctgaccatccattcctcttctgtatcaagcacatcgcaaccaacgccgttctcttctttggcagatgtgtttccccttcgaagcttgaaggtaagcctatccctaaccctctcctcggtctcgattctacgcgtaccggtcatcatcaccatcaccattga

SEQ ID NO: 317 - DNA, 38 bp, Artificial Sequence
  primer STF28BGF-1
ctcgggagatctgcacaagtaatcaacactaacagtct

SEQ ID NO: 318 - DNA, 41 bp, Artificial Sequence
  primer STF28MCR-1
ccatgggctagcaggatccaccggcgctccctgcacgttca

SEQ ID NO: 319 - DNA, 42 bp, Artificial Sequence
  primer STF28MCF-2
ggagcgccggtggatcctgctagcccatggaccgaaaacccg

SEQ ID NO: 320 - DNA, 84 bp, Artificial Sequence
  primer STF28ECR-2
tctgcagaattcacgtaacagagacagcacgttctgcgggacgtcccgcagaacgtgctgtctctgttacgtgaattctgcaga

SEQ ID NO: 321 - DNA, 37 bp, Artificial Sequence
  primer 3'Forward1
actgagtgcatatggcacaagtaatcaacactaacag

SEQ ID NO: 322 - DNA, 55 bp, Artificial Sequence
  primer 3'Reverse1
gactgactgctcagcctattagcagagcggccgccactgtgctggatatctagag

SEQ ID NO: 323 - DNA, 44 bp, Artificial Sequence
  primer 5'Forward2
agtcaggccatatgtgcgcacaagtaatcaacactaacagtctg

SEQ ID NO: 324 - DNA, 59 bp, Artificial Sequence
  primer 5"Reverse2
gactgactgctcagcctattaacgtaacagagacagcacgttctgcgggacctggttag

SEQ ID NO: 325 - DNA, 870 bp, Artificial Sequence
  STF2delta.3'Cys
atggcacaagtaatcaacactaacagtctgtcgctgctgacccagaataacctgaacaaatcccagtccgcactgggcaccgctatcgagcgtctgtcttctggtctgcgtatcaacagcgcgaaagacgatgcggcaggtcaggcgattgctaaccgtttcaccgcgaacatcaaaggtctgactcaggcttcccgtaacgctaacgacggtatctccattgcgcagaccactgaaggcgcgctgaacgaaatcaacaacaacctgcagcgtgtgcgtgaactggcggttcagtctgctaacagcaccaactcccagtctgacctcgactccatccaggctgaaatcacccagcgcctgaacgaaatcgaccgtgtatccggccagactcagttcaacggcgtgaaagtcctggcgcaggacaacaccctgaccatccaggttggcgccaacgacggtgaaactatcgatatcgatctgaagcagatcaactctcagaccctgggtctggactcactgaacgtgcatggagcgccggtggatcctgctagcccatggaccgaaaacccgctgcagaaaattgatgccgcgctggcgcaggtggatgcgctgcgctctgatctgggtgcggtacaaaaccgtttcaactctgctatcaccaacctgggcaataccgtaaacaatctgtctgaagcgcgtagccgtatcgaagattccgactacgcgaccgaagtttccaacatgtctcgcgcgcagattttgcagcaggccggtacttccgttctggcgcaggctaaccaggtcccgcagaacgtgctgtctctgttacgtgaattctctagatatccagcacagtggcggccgctctgc

SEQ ID NO: 326 - DNA, 834 bp, Artificial Sequence
  5'Cys.STF2delta
atgtgcgcacaagtaatcaacactaacagtctgtcgctgctgacccagaataacctgaacaaatcccagtccgcactgggcaccgctatcgagcgtctgtcttctggtctgcgtatcaacagcgcgaaagacgatgcggcaggtcaggcgattgctaaccgtttcaccgcgaacatcaaaggtctgactcaggcttcccgtaacgctaacgacggtatctccattgcgcagaccactgaaggcgcgctgaacgaaatcaacaacaacctgcagcgtgtgcgtgaactggcggttcagtctgctaacagcaccaactcccagtctgacctcgactccatccaggctgaaatcacccagcgcctgaacgaaatcgaccgtgtatccggccagactcagttcaacggcgtgaaagtcctggcgcaggacaacaccctgaccatccaggttggcgccaacgacggtgaaactatcgatatcgatctgaagcagatcaactctcagaccctgggtctggactcactgaacgtgcatggagcgccggtggatcctgctagcccatggaccgaaaacccgctgcagaaaattgatgccgcgctggcgcaggtggatgcgctgcgctctgatctgggtgcggtacaaaaccgtttcaactctgctatcaccaacctgggcaataccgtaaacaatctgtctgaagcgcgtagccgtatcgaagattccgactacgcgaccgaagtttccaacatgtctcgcgcgcagattttgcagcaggccggtacttccgttctggcgcaggctaaccaggtcccgcagaacgtgctgtctctgttacgt

SEQ ID NO: 327 - DNA, 37 bp, Artificial Sequence; identical to SEQ ID NO: 321
  Primer HingeForward1

SEQ ID NO: 328 - DNA, 31 bp, Artificial Sequence
  Primer HingeReverse3
ggtccatgggcaagcaggatccaccggcgct

SEQ ID NO: 329 - DNA, 31 bp, Artificial Sequence
  Primer HingeForward2
agcgccggtggatcctgcttgcccatggacc

SEQ ID NO: 330 - DNA, 59 bp, Artificial Sequence; identical to SEQ ID NO: 324
  Primer HingeReverse4

SEQ ID NO: 331 - DNA, 831 bp, Artificial Sequence
  STF2delta.HingeCys
atggcacaagtaatcaacactaacagtctgtcgctgctgacccagaataacctgaacaaatcccagtccgcactgggcaccgctatcgagcgtctgtcttctggtctgcgtatcaacagcgcgaaagacgatgcggcaggtcaggcgattgctaaccgtttcaccgcgaacatcaaaggtctgactcaggcttcccgtaacgctaacgacggtatctccattgcgcagaccactgaaggcgcgctgaacgaaatcaacaacaacctgcagcgtgtgcgtgaactggcggttcagtctgctaacagcaccaactcccagtctgacctcgactccatccaggctgaaatcacccagcgcctgaacgaaatcgaccgtgtatccggccagactcagttcaacggcgtgaaagtcctggcgcaggacaacaccctgaccatccaggttggcgccaacgacggtgaaactatcgatatcgatctgaagcagatcaactctcagaccctgggtctggactcactgaacgtgcatggagcgccggtggatcctgcttgcccatggaccgaaaacccgctgcagaaaattgatgccgcgctggcgcaggtggatgcgctgcgctctgatctgggtgcggtacaaaaccgtttcaactctgctatcaccaacctgggcaataccgtaaacaatctgtctgaagcgcgtagccgtatcgaagattccgactacgcgaccgaagtttccaacatgtctcgcgcgcagattttgcagcaggccggtacttccgttctggcgcaggctaaccaggtcccgcagaacgtgctgtctctgttacgt

SEQ ID NO: 332 - protein, 290 aa, Artificial Sequence
  STF2delta.3'Cys
MAQVINTNSLSLLTQNNLNKSQSALGTAIERLSSGLRINSAKDDAAGQAIANRFTANIKGLTQASRNANDGISIAQTTEGALNEINNNLQRVRELAVQSANSTNSQSDLDSIQAEITQRLNEIDRVSGQTQFNGVKVLAQDNTLTIQVGANDGETIDIDLKQINSQTLGLDSLNVHGAPVDPASPWTENPLQKIDAALAQVDALRSDLGAVQNRFNSAITNLGNTVNNLSEARSRIEDSDYATEVSNMSRAQILQQAGTSVLAQANQVPQNVLSLLREFSRYPAQWRPLC

SEQ ID NO: 333 - protein, 277 aa, Artificial Sequence
  STF2delta.HingeCys
MAQVINTNSLSLLTQNNLNKSQSALGTAIERLSSGLRINSAKDDAAGQAIANRFTANIKGLTQASRNANDGISIAQTTEGALNEINNNLQRVRELAVQSANSTNSQSDLDSIQAEITQRLNEIDRVSGQTQFNGVKVLAQDNTLTIQVGANDGETIDIDLKQINSQTLGLDSLNVHGAPVDPACPWTENPLQKIDAALAQVDALRSDLGAVQNRFNSAITNLGNTVNNLSEARSRIEDSDYATEVSNMSRAQILQQAGTSVLAQANQVPQNVLSLLR

SEQ ID NO: 334 - protein, 278 aa, Artificial Sequence
  5'Cys.STF2delta
MCAQVINTNSLSLLTQNNLNKSQSALGTAIERLSSGLRINSAKDDAAGQAIANRFTANIKGLTQASRNANDGISIAQTTEGALNEINNNLQRVRELAVQSANSTNSQSDLDSIQAEITQRLNEIDRVSGQTQFNGVKVLAQDNTLTIQVGANDGETIDIDLKQINSQTLGLDSLNVHGAPVDPASPWTENPLQKIDAALAQVDALRSDLGAVQNRFNSAITNLGNTVNNLSEARSRIEDSDYATEVSNMSRAQILQQAGTSVLAQANQVPQNVLSLLR

SEQ ID NO: 335 - protein, 8 aa, Artificial Sequence
  lipopeptide
CSKKKKGC

SEQ ID NO: 336 - protein, 10 aa, Artificial Sequence
  linker
GAPVDPASPW

SEQ ID NO: 337 - protein, 19 aa, Artificial Sequence
  H1C1 peptide
NIPSIQSRGLFFAIAGFIE

SEQ ID NO: 338 - protein, 20 aa, Artificial Sequence
  Cys H1C1
CNIPSIQSRGLFFAIAGFIE

SEQ ID NO: 339 - protein, 20 aa, Artificial Sequence
  Lys H1C1
KNIPSIQSRGLFFAIAGFIE

SEQ ID NO: 340 - DNA, 1518 bp, Artificial Sequence; identical to SEQ ID NO: 51
  STF2.b1p

SEQ ID NO: 341 - protein, 19 aa, Artificial Sequence
  HA maturation cleavage fragment (H1N1)
NIPSIQSRGLFGAIAGFIE

SEQ ID NO: 342 - protein, 529 aa, Artificial Sequence
  STF2.1xH1C1
MAQVINTNSLSLLTQNNLNKSQSALGTAIERLSSGLRINSAKDDAAGQAIANRFTANIKGLTQASRNANDGISIAQTTEGALNEINNNLQRVRELAVQSANSTNSQSDLDSIQAEITQRLNEIDRVSGQTQFNGVKVLAQDNTLTIQVGANDGETIDIDLKQINSQTLGLDSLNVQKAYDVKDTAVTTKAYANNGTTLDVSGLDDAAIKAATGGTNGTASVTGGAVKFDADNNKYFVTIGGFTGADAAKNGDYEVNVATDGTVTLAAGATKTTMPAGATTKTEVQELKDTPAVVSADAKNALIAGGVDATDANGAELVKMSYTDKNGKTIEGGYALKAGDKYYAADYDEATGAIKAKTTSYTAADGTTKTAANQLGGVDGKTEVVTIDGKTYNASKAAGHDFKAQPELAEAAAKTTENPLQKIDAALAQVDALRSDLGAVQNRFNSAITNLGNTVNNLSEARSRIEDSDYATEVSNMSRAQILQQAGTSVLAQANQVPQNVLSLLAMEWENIPSIQSRGLFGAIAGFIE

SEQ ID NO: 343 - protein, 551 aa, Artificial Sequence
  STF2.2xH1C1
MAQVINTNSLSLLTQNNLNKSQSALGTAIERLSSGLRINSAKDDAAGQAIANRFTANIKGLTQASRNANDGISIAQTTEGALNEINNNLQRVRELAVQSANSTNSQSDLDSIQAEITQRLNEIDRVSGQTQFNGVKVLAQDNTLTIQVGANDGETIDIDLKQINSQTLGLDSLNVQKAYDVKDTAVTTKAYANNGTTLDVSGLDDAAIKAATGGTNGTASVTGGAVKFDADNNKYFVTIGGFTGADAAKNGDYEVNVATDGTVTLAAGATKTTMPAGATTKTEVQELKDTPAVVSADAKNALIAGGVDATDANGAELVKMSYTDKNGKTIEGGYALKAGDKYYAADYDEATGAIKAKTTSYTAADGTTKTAANQLGGVDGKTEVVTIDGKTYNASKAAGHDFKAQPELAEAAAKTTENPLQKIDAALAQVDALRSDLGAVQNRFNSAITNLGNTVNNLSEARSRIEDSDYATEVSNMSRAQILQQAGTSVLAQANQVPQNVLSLLAMEWENIPSIQSRGLFGAIAGFIEEWENIPSIQSRGLFGAIAGFIE

SEQ ID NO: 344 - protein, 573 aa, Artificial Sequence
  STF2.3xH1C1
MAQVINTNSLSLLTQNNLNKSQSALGTAIERLSSGLRINSAKDDAAGQAIANRFTANIKGLTQASRNANDGISIAQTTEGALNEINNNLQRVRELAVQSANSTNSQSDLDSIQAEITQRLNEIDRVSGQTQFNGVKVLAQDNTLTIQVGANDGETIDIDLKQINSQTLGLDSLNVQKAYDVKDTAVTTKAYANNGTTLDVSGLDDAAIKAATGGTNGTASVTGGAVKFDADNNKYFVTIGGFTGADAAKNGDYEVNVATDGTVTLAAGATKTTMPAGATTKTEVQELKDTPAVVSADAKNALIAGGVDATDANGAELVKMSYTDKNGKTIEGGYALKAGDKYYAADYDEATGAIKAKTTSYTAADGTTKTAANQLGGVDGKTEVVTIDGKTYNASKAAGHDFKAQPELAEAAAKTTENPLQKIDAALAQVDALRSDLGAVQNRFNSAITNLGNTVNNLSEARSRIEDSDYATEVSNMSRAQILQQAGTSVLAQANQVPQNVLSLLAMEWENIPSIQSRGLFGAIAGFIEEWENIPSIQSRGLFGAIAGFIEEWENIPSIQSRGLFGAIAGFIE

SEQ ID NO: 345 - protein, 595 aa, Artificial Sequence
  STF2.4xH1C1
MAQVINTNSLSLLTQNNLNKSQSALGTAIERLSSGLRINSAKDDAAGQAIANRFTANIKGLTQASRNANDGISIAQTTEGALNEINNNLQRVRELAVQSANSTNSQSDLDSIQAEITQRLNEIDRVSGQTQFNGVKVLAQDNTLTIQVGANDGETIDIDLKQINSQTLGLDSLNVQKAYDVKDTAVTTKAYANNGTTLDVSGLDDAAIKAATGGTNGTASVTGGAVKFDADNNKYFVTIGGFTGADAAKNGDYEVNVATDGTVTLAAGATKTTMPAGATTKTEVQELKDTPAVVSADAKNALIAGGVDATDANGAELVKMSYTDKNGKTIEGGYALKAGDKYYAADYDEATGAIKAKTTSYTAADGTTKTAANQLGGVDGKTEVVTIDGKTYNASKAAGHDFKAQPELAEAAAKTTENPLQKIDAALAQVDALRSDLGAVQNRFNSAITNLGNTVNNLSEARSRIEDSDYATEVSNMSRAQILQQAGTSVLAQANQVPQNVLSLLAMEWENIPSIQSRGLFGAIAGFIEEWENIPSIQSRGLFGAIAGFIEEWENIPSIQSRGLFGAIAGFIEEWENIPSIQSRGLFGAIAGFIE

SEQ ID NO: 346 - protein, 601 aa, Artificial Sequence
  STF2.4xH1C2
MAQVINTNSLSLLTQNNLNKSQSALGTAIERLSSGLRINSAKDDAAGQAIANRFTANIKGLTQASRNANDGISIAQTTEGALNEINNNLQRVRELAVQSANSTNSQSDLDSIQAEITQRLNEIDRVSGQTQFNGVKVLAQDNTLTIQVGANDGETIDIDLKQINSQTLGLDSLNVQKAYDVKDTAVTTKAYANNGTTLDVSGLDDAAIKAATGGTNGTASVTGGAVKFDADNNKYFVTIGGFTGADAAKNGDYEVNVATDGTVTLAAGATKTTMPAGATTKTEVQELKDTPAVVSADAKNALIAGGVDATDANGAELVKMSYTDKNGKTIEGGYALKAGDKYYAADYDEATGAIKAKTTSYTAADGTTKTAANQLGGVDGKTEVVTIDGKTYNASKAAGHDFKAQPELAEAAAKTTENPLQKIDAALAQVDALRSDLGAVQNRFNSAITNLGNTVNNLSEARSRIEDSDYATEVSNMSRAQILQQAGTSVLAQANQVPQNVLSLLAGCGSEWENIPSIQSRGLFGAIAGFIEEWENIPSIQSRGLFGAIAGFIEEWENIPSIQSRGLFGAIAGFIEEWENIPSIQSRGLFGAIAGFIESGC

SEQ ID NO: 347 - protein, 19 aa, Artificial Sequence
  HA maturation cleavage fragment (H5N1)
RERRRKKRGLFGAIAGFIE

SEQ ID NO: 348 - protein, 594 aa, Artificial Sequence
  STF2.4xH5C1
MAQVINTNSLSLLTQNNLNKSQSALGTAIERLSSGLRINSAKDDAAGQAIANRFTANIKGLTQASRNANDGISIAQTTEGALNEINNNLQRVRELAVQSANSTNSQSDLDSIQAEITQRLNEIDRVSGQTQFNGVKVLAQDNTLTIQVGANDGETIDIDLKQINSQTLGLDSLNVQKAYDVKDTAVTTKAYANNGTTLDVSGLDDAAIKAATGGTNGTASVTGGAVKFDADNNKYFVTIGGFTGADAAKNGDYEVNVATDGTVTLAAGATKTTMPAGATTKTEVQELKDTPAVVSADAKNALIAGGVDATDANGAELVKMSYTDKNGKTIEGGYALKAGDKYYAADYDEATGAIKAKTTSYTAADGTTKTAANQLGGVDGKTEVVTIDGKTYNASKAAGHDFKAQPELAEAAAKTTENPLQKIDAALAQVDALRSDLGAVQNRFNSAITNLGNTVNNLSEARSRIEDSDYATEVSNMSRAQILQQAGTSVLAQANQVPQNVLSLLAEWERERRRKKRGLFGAIAGFIEEWERERRRKKRGLFGAIAGFIEEWERERRRKKRGLFGAIAGFIEEWERERRRKKRGLFGAIAGFIE

SEQ ID NO: 349 - protein, 19 aa, Artificial Sequence
  HA maturation cleavage fragment (H3N2)
NVPEKQTRGIFGAIAGFIE

SEQ ID NO: 350 - protein, 19 aa, Artificial Sequence
  HA maturation cleavage fragment
NVPQIESRGLFGAIAGFIE

SEQ ID NO: 351 - protein, 19 aa, Artificial Sequence
  HA maturation cleavage fragment (B strain)
PAKLLKERGFFGAIAGFLE

SEQ ID NO: 352 - DNA, 1798 bp, Artificial Sequence
  STF2.4xH1C1
atggcacaagtaatcaacactaacagtctgtcgctgctgacccagaataacctgaacaaatcccagtccgcactgggcaccgctatcgagcgtctgtcttctggtctgcgtatcaacagcgcgaaagacgatgcggcaggtcaggcgattgctaaccgtttcaccgcgaacatcaaaggtctgactcaggcttcccgtaacgctaacgacggtatctccattgcgcagaccactgaaggcgcgctgaacgaaatcaacaacaacctgcagcgtgtgcgtgaactggcggttcagtctgctaacagcaccaactcccagtctgacctcgactccatccaggctgaaatcacccagcgcctgaacgaaatcgaccgtgtatccggccagactcagttcaacggcgtgaaagtcctggcgcaggacaacaccctgaccatccaggttggcgccaacgacggtgaaactatcgatatcgatctgaagcagatcaactctcagaccctgggtctggactcactgaacgtgcagaaagcgtatgatgtgaaagatacagcagtaacaacgaaagcttatgccaataatggtactacactggatgtatcgggtcttgatgatgcagctattaaagcggctacgggtggtacgaatggtacggcttctgtaaccggtggtgcggttaaatttgacgcagataataacaagtactttgttactattggtggctttactggtgctgatgccgccaaaaatggcgattatgaagttaacgttgctactgacggtacagtaacccttgcggctggcgcaactaaaaccacaatgcctgctggtgcgacaactaaaacagaagtacaggagttaaaagatacaccggcagttgtttcagcagatgctaaaaatgccttaattgctggcggcgttgacgctaccgatgctaatggcgctgagttggtcaaaatgtcttataccgataaaaatggtaagacaattgaaggcggttatgcgcttaaagctggcgataagtattacgccgcagattacgatgaagcgacaggagcaattaaagctaaaactacaagttatactgctgctgacggcactaccaaaacagcggctaaccaactgggtggcgtagacggtaaaaccgaagtcgttactatcgacggtaaaacctacaatgccagcaaagccgctggtcatgatttcaaagcacaaccagagctggcggaagcagccgctaaaaccaccgaaaacccgctgcagaaaattgatgccgcgctggcgcaggtggatgcgctgcgctctgatctgggtgcggtacaaaaccgtttcaactctgctatcaccaacctgggcaataccgtaaacaatctgtctgaagcgcgtagccgtatcgaagattccgactacgcgaccgaagtttccaacatgtctcgcgcgcagattctgcagcaggccggtacttccgttctggcgcaggctaaccaggtcccgcagaacgtgctgtctctgttagcgatggaatgggagaacatccctagcatccaatctcgcggcctgtttggcgctatcgcgggctttatcgaagaatgggagaacatcccgagcatccaatctcgcggtctgtttggtgcgatcgctggtttcatcgaggagtgggagaacattcctagcattcaaagccgtggcctgttcggcgctattgcaggttttattgaagaatgggaaaatatcccgtctatccaatcccgcggtctgttcggcgcgatcgcaggtttcattgaataataagctaagc

SEQ ID NO: 353 - DNA, 1738 bp, Artificial Sequence
  STF2.3xH1C1
atggcacaagtaatcaacactaacagtctgtcgctgctgacccagaataacctgaacaaatcccagtccgcactgggcaccgctatcgagcgtctgtcttctggtctgcgtatcaacagcgcgaaagacgatgcggcaggtcaggcgattgctaaccgtttcaccgcgaacatcaaaggtctgactcaggcttcccgtaacgctaacgacggtatctccattgcgcagaccactgaaggcgcgctgaacgaaatcaacaacaacctgcagcgtgtgcgtgaactggcggttcagtctgctaacagcaccaactcccagtctgacctcgactccatccaggctgaaatcacccagcgcctgaacgaaatcgaccgtgtatccggccagactcagttcaacggcgtgaaagtcctggcgcaggacaacaccctgaccatccaggttggcgccaacgacggtgaaactatcgatatcgatctgaagcagatcaactctcagaccctgggtctggactcactgaacgtgcagaaagcgtatgatgtgaaagatacagcagtaacaacgaaagcttatgccaataatggtactacactggatgtatcgggtcttgatgatgcagctattaaagcggctacgggtggtacgaatggtacggcttctgtaaccggtggtgcggttaaatttgacgcagataataacaagtactttgttactattggtggctttactggtgctgatgccgccaaaaatggcgattatgaagttaacgttgctactgacggtacagtaacccttgcggctggcgcaactaaaaccacaatgcctgctggtgcgacaactaaaacagaagtacaggagttaaaagatacaccggcagttgtttcagcagatgctaaaaatgccttaattgctggcggcgttgacgctaccgatgctaatggcgctgagttggtcaaaatgtcttataccgataaaaatggtaagacaattgaaggcggttatgcgcttaaagctggcgataagtattacgccgcagattacgatgaagcgacaggagcaattaaagctaaaactacaagttatactgctgctgacggcactaccaaaacagcggctaaccaactgggtggcgtagacggtaaaaccgaagtcgttactatcgacggtaaaacctacaatgccagcaaagccgctggtcatgatttcaaagcacaaccagagctggcggaagcagccgctaaaaccaccgaaaacccgctgcagaaaattgatgccgcgctggcgcaggtggatgcgctgcgctctgatctgggtgcggtacaaaaccgtttcaactctgctatcaccaacctgggcaataccgtaaacaatctgtctgaagcgcgtagccgtatcgaagattccgactacgcgaccgaagtttccaacatgtctcgcgcgcagattctgcagcaggccggtacttccgttctggcgcaggctaaccaggtcccgcagaacgtgctgagcctgttagcgatggaatgggaaaatatccctagcatccaatctcgcggtctgttcggtgctattgctggcttcatcgaggaatgggagaacatcccatctattcagtctcgcggcctgtttggtgcgatcgcgggttttattgaggaatgggaaaacattccaagcattcagtcacgtggtcttttcggcgccatcgctggttttatcgaatgataagcttagcccaagg

SEQ ID NO: 354 - DNA, 1672 bp, Artificial Sequence
  STF2.2xH1C1
atggcacaagtaatcaacactaacagtctgtcgctgctgacccagaataacctgaacaaatcccagtccgcactgggcaccgctatcgagcgtctgtcttctggtctgcgtatcaacagcgcgaaagacgatgcggcaggtcaggcgattgctaaccgtttcaccgcgaacatcaaaggtctgactcaggcttcccgtaacgctaacgacggtatctccattgcgcagaccactgaaggcgcgctgaacgaaatcaacaacaacctgcagcgtgtgcgtgaactggcggttcagtctgctaacagcaccaactcccagtctgacctcgactccatccaggctgaaatcacccagcgcctgaacgaaatcgaccgtgtatccggccagactcagttcaacggcgtgaaagtcctggcgcaggacaacaccctgaccatccaggttggcgccaacgacggtgaaactatcgatatcgatctgaagcagatcaactctcagaccctgggtctggactcactgaacgtgcagaaagcgtatgatgtgaaagatacagcagtaacaacgaaagcttatgccaataatggtactacactggatgtatcgggtcttgatgatgcagctattaaagcggctacgggtggtacgaatggtacggcttctgtaaccggtggtgcggttaaatttgacgcagataataacaagtactttgttactattggtggctttactggtgctgatgccgccaaaaatggcgattatgaagttaacgttgctactgacggtacagtaacccttgcggctggcgcaactaaaaccacaatgcctgctggtgcgacaactaaaacagaagtacaggagttaaaagatacaccggcagttgtttcagcagatgctaaaaatgccttaattgctggcggcgttgacgctaccgatgctaatggcgctgagttggtcaaaatgtcttataccgataaaaatggtaagacaattgaaggcggttatgcgcttaaagctggcgataagtattacgccgcagattacgatgaagcgacaggagcaattaaagctaaaactacaagttatactgctgctgacggcactaccaaaacagcggctaaccaactgggtggcgtagacggtaaaaccgaagtcgttactatcgacggtaaaacctacaatgccagcaaagccgctggtcatgatttcaaagcacaaccagagctggcggaagcagccgctaaaaccaccgaaaacccgctgcagaaaattgatgccgcgctggcgcaggtggatgcgctgcgctctgatctgggtgcggtacaaaaccgtttcaactctgctatcaccaacctgggcaataccgtaaacaatctgtctgaagcgcgtagccgtatcgaagattccgactacgcgaccgaagtttccaacatgtctcgcgcgcagattctgcagcaggccggtacttccgttctggcgcaggctaaccaggtcccgcagaacgtgctgagcctgttagcgatggaatgggaaaatatccctagcatccaatctcgcggtctgttcggtgctattgctggcttcatcgaggaatgggagaacatcccatctattcagtctcgcggcctgtttggtgcgatcgcgggttttattgagtgataagcttagcccaagg

SEQ ID NO: 355 - DNA, 1606 bp, Artificial Sequence
  STF2.1xH1C1
atggcacaagtaatcaacactaacagtctgtcgctgctgacccagaataacctgaacaaatcccagtccgcactgggcaccgctatcgagcgtctgtcttctggtctgcgtatcaacagcgcgaaagacgatgcggcaggtcaggcgattgctaaccgtttcaccgcgaacatcaaaggtctgactcaggcttcccgtaacgctaacgacggtatctccattgcgcagaccactgaaggcgcgctgaacgaaatcaacaacaacctgcagcgtgtgcgtgaactggcggttcagtctgctaacagcaccaactcccagtctgacctcgactccatccaggctgaaatcacccagcgcctgaacgaaatcgaccgtgtatccggccagactcagttcaacggcgtgaaagtcctggcgcaggacaacaccctgaccatccaggttggcgccaacgacggtgaaactatcgatatcgatctgaagcagatcaactctcagaccctgggtctggactcactgaacgtgcagaaagcgtatgatgtgaaagatacagcagtaacaacgaaagcttatgccaataatggtactacactggatgtatcgggtcttgatgatgcagctattaaagcggctacgggtggtacgaatggtacggcttctgtaaccggtggtgcggttaaatttgacgcagataataacaagtactttgttactattggtggctttactggtgctgatgccgccaaaaatggcgattatgaagttaacgttgctactgacggtacagtaacccttgcggctggcgcaactaaaaccacaatgcctgctggtgcgacaactaaaacagaagtacaggagttaaaagatacaccggcagttgtttcagcagatgctaaaaatgccttaattgctggcggcgttgacgctaccgatgctaatggcgctgagttggtcaaaatgtcttataccgataaaaatggtaagacaattgaaggcggttatgcgcttaaagctggcgataagtattacgccgcagattacgatgaagcgacaggagcaattaaagctaaaactacaagttatactgctgctgacggcactaccaaaacagcggctaaccaactgggtggcgtagacggtaaaaccgaagtcgttactatcgacggtaaaacctacaatgccagcaaagccgctggtcatgatttcaaagcacaaccagagctggcggaagcagccgctaaaaccaccgaaaacccgctgcagaaaattgatgccgcgctggcgcaggtggatgcgctgcgctctgatctgggtgcggtacaaaaccgtttcaactctgctatcaccaacctgggcaataccgtaaacaatctgtctgaagcgcgtagccgtatcgaagattccgactacgcgaccgaagtttccaacatgtctcgcgcgcagattctgcagcaggccggtacttccgttctggcgcaggctaaccaggtcccgcagaacgtgctgagcctgttagcgatggaatgggaaaatatccctagcatccaatctcgcggtctgttcggtgctattgctggcttcatcgagtgataagcttagcccaagg

SEQ ID NO: 356 - DNA, 1816 bp, Artificial Sequence
  STF2.4xH1C1
atggcacaagtaatcaacactaacagtctgtcgctgctgacccagaataacctgaacaaatcccagtccgcactgggcaccgctatcgagcgtctgtcttctggtctgcgtatcaacagcgcgaaagacgatgcggcaggtcaggcgattgctaaccgtttcaccgcgaacatcaaaggtctgactcaggcttcccgtaacgctaacgacggtatctccattgcgcagaccactgaaggcgcgctgaacgaaatcaacaacaacctgcagcgtgtgcgtgaactggcggttcagtctgctaacagcaccaactcccagtctgacctcgactccatccaggctgaaatcacccagcgcctgaacgaaatcgaccgtgtatccggccagactcagttcaacggcgtgaaagtcctggcgcaggacaacaccctgaccatccaggttggcgccaacgacggtgaaactatcgatatcgatctgaagcagatcaactctcagaccctgggtctggactcactgaacgtgcagaaagcgtatgatgtgaaagatacagcagtaacaacgaaagcttatgccaataatggtactacactggatgtatcgggtcttgatgatgcagctattaaagcggctacgggtggtacgaatggtacggcttctgtaaccggtggtgcggttaaatttgacgcagataataacaagtactttgttactattggtggctttactggtgctgatgccgccaaaaatggcgattatgaagttaacgttgctactgacggtacagtaacccttgcggctggcgcaactaaaaccacaatgcctgctggtgcgacaactaaaacagaagtacaggagttaaaagatacaccggcagttgtttcagcagatgctaaaaatgccttaattgctggcggcgttgacgctaccgatgctaatggcgctgagttggtcaaaatgtcttataccgataaaaatggtaagacaattgaaggcggttatgcgcttaaagctggcgataagtattacgccgcagattacgatgaagcgacaggagcaattaaagctaaaactacaagttatactgctgctgacggcactaccaaaacagcggctaaccaactgggtggcgtagacggtaaaaccgaagtcgttactatcgacggtaaaacctacaatgccagcaaagccgctggtcatgatttcaaagcacaaccagagctggcggaagcagccgctaaaaccaccgaaaacccgctgcagaaaattgatgccgcgctggcgcaggtggatgcgctgcgctctgatctgggtgcggtacaaaaccgtttcaactctgctatcaccaacctgggcaataccgtaaacaatctgtctgaagcgcgtagccgtatcgaagattccgactacgcgaccgaagtttccaacatgtctcgcgcgcagattctgcagcaggccggtacttccgttctggcgcaggctaaccaggtcccgcagaacgtgctgtctctgttagcgggttgtggttccgagtgggaaaatattccgtctatccagagccgtggtctgttcggcgcaattgctggcttcattgaagaatgggaaaacatcccgtccatccagagccgtggcctgttcggcgccattgctggtttcatcgaggaatgggaaaacattccgtccatccagtcccgcggtctgtttggcgctatcgccggtttcattgaggaatgggaaaatatcccttccatccagtctcgtggtctgttcggcgcgattgcaggctttatcgaatctggttgctaataagctaagc

SEQ ID NO: 357 - protein, 78 aa, Bacterial lipoprotein of E. coli
MKATKLVLGAVILGSTLLAGCSSNAKIDQLSSDVQTLNAKVDQLSNDVNAMRSDVQAAKDDAARANQRLDNMATKYRK

SEQ ID NO: 358 - protein, 26 aa, Artificial Sequence
  H1C1 native peptide
SLWSEENIPSIQSRGLFGAIAGFIEE

SEQ ID NO: 359 - protein, 8 aa, Artificial Sequence
  TLR4 peptide
GGKSGRTG

SEQ ID NO: 360 - protein, 9 aa, Artificial Sequence
  TLR4 peptide
KGYDWLVVG

SEQ ID NO: 361 - protein, 10 aa, Artificial Sequence
  TLR4 peptide
EDMVYRIGVP

SEQ ID NO: 362 - protein, 6 aa, Artificial Sequence
  TLR4 peptide
VKLSGS

SEQ ID NO: 363 - protein, 8 aa, Artificial Sequence
  TLR4 peptide
GMLSLALF

SEQ ID NO: 364 - protein, 7 aa, Artificial Sequence
  TLR4 peptide
CVVGSVR

SEQ ID NO: 365 - protein, 8 aa, Artificial Sequence
  TLR4 peptide
IVRGCLGW

SEQ ID NO: 366 - protein, 8 aa, Artificial Sequence
  TLR4 peptide
AAEERTLG

SEQ ID NO: 367 - protein, 9 aa, Artificial Sequence
  TLR4 peptide
WARVVGWLR

SEQ ID NO: 368 - protein, 9 aa, Artificial Sequence
  TLR4 peptide
SEGYRLFGG

SEQ ID NO: 369 - protein, 10 aa, Artificial Sequence
  TLR4 peptide
LVGGVVRRGS

SEQ ID NO: 370 - protein, 10 aa, Artificial Sequence
  TLR4 peptide
GRVNDLWLAA

SEQ ID NO: 371 - protein, 10 aa, Artificial Sequence
  TLR4 peptide
SGWMLWREGS

SEQ ID NO: 372 - protein, 10 aa, Artificial Sequence
  TLR4 peptide
ERMEDRGGDL

SEQ ID NO: 373 - protein, 9 aa, Artificial Sequence
  TLR4 peptide
KLCCFTECM

SEQ ID NO: 374 - protein, 10 aa, Artificial Sequence
  TLR4 peptide
AVGSMERGRG

SEQ ID NO: 375 - protein, 9 aa, Artificial Sequence
  TLR4 peptide
RDWVGGDLV

SEQ ID NO: 376 - protein, 10 aa, Artificial Sequence
  TLR4 peptide
FFEVAKISQQ

SEQ ID NO: 377 - protein, 5 aa, Artificial Sequence
  TLR4 peptide
WWYWC

SEQ ID NO: 378 - protein, 7 aa, Artificial Sequence
  TLR4 peptide
MHLCSHA

SEQ ID NO: 379 - protein, 7 aa, Artificial Sequence
  TLR4 peptide
WLFRRIG

SEQ ID NO: 380 - protein, 7 aa, Artificial Sequence
  TLR4 peptide
YWFWRIG

SEQ ID NO: 381 - protein, 7 aa, Artificial Sequence
  TLR4 peptide
MHLYCIA

SEQ ID NO: 382 - protein, 8 aa, Artificial Sequence
  TLR4 peptide
WPLFPWIV

SEQ ID NO: 383 - protein, 7 aa, Artificial Sequence
  TLR4 peptide
DMRSHAR

SEQ ID NO: 384 - protein, 7 aa, Artificial Sequence
  TLR4 peptide
MHLCTHA

SEQ ID NO: 385 - protein, 6 aa, Artificial Sequence
  TLR4 peptide
NLFPFY

SEQ ID NO: 386 - protein, 7 aa, Artificial Sequence
  TLR4 peptide
MHLCTRA

SEQ ID NO: 387 - protein, 7 aa, Artificial Sequence
  TLR4 peptide
RHLWYHA

SEQ ID NO: 388 - protein, 7 aa, Artificial Sequence
  TLR4 peptide
WPFSAYW

SEQ ID NO: 389 - protein, 6 aa, Artificial Sequence
  TLR4 peptide
WYLRGS

SEQ ID NO: 390 - protein, 7 aa, Artificial Sequence
  TLR4 peptide
GKGTDLG

SEQ ID NO: 391 - protein, 6 aa, Artificial Sequence
  TLR4 peptide
IFVRMR

SEQ ID NO: 392 - protein, 7 aa, Artificial Sequence
  TLR4 peptide
WLFRPVF

SEQ ID NO: 393 - protein, 7 aa, Artificial Sequence
  TLR4 peptide
FLGWLMG

SEQ ID NO: 394 - protein, 7 aa, Artificial Sequence
  TLR4 peptide
MHLWHHA

SEQ ID NO: 395 - protein, 7 aa, Artificial Sequence
  TLR4 peptide
WWFPWKA

SEQ ID NO: 396 - protein, 7 aa, Artificial Sequence
  TLR4 peptide
WYLPWLG

SEQ ID NO: 397 - protein, 7 aa, Artificial Sequence
  TLR4 peptide
WPFPRTF

SEQ ID NO: 398 - protein, 7 aa, Artificial Sequence
  TLR4 peptide
WPFPAYW

SEQ ID NO: 399 - protein, 7 aa, Artificial Sequence
  TLR4 peptide
FLGLRWL

SEQ ID NO: 400 - protein, 10 aa, Artificial Sequence
  TLR4 peptide
SRTDVGVLEV

SEQ ID NO: 401 - protein, 10 aa, Artificial Sequence
  TLR4 peptide
REKVSRGDKG

SEQ ID NO: 402 - protein, 10 aa, Artificial Sequence
  TLR4 peptide
DWDAVESEYM

SEQ ID NO: 403 - protein, 10 aa, Artificial Sequence
  TLR4 peptide
VSSAQEVRVP

SEQ ID NO: 404 - protein, 10 aa, Artificial Sequence
  TLR4 peptide
LTYGGLEALG

SEQ ID NO: 405 - protein, 10 aa, Artificial Sequence
  TLR4 peptide
VEEYSSSGVS

SEQ ID NO: 406 - protein, 10 aa, Artificial Sequence
  TLR4 peptide
VCEVSDSVMA

SEQ ID NO: 407 - protein, 8 aa, Artificial Sequence
  TLR4 peptide
GGKSGRTG

SEQ ID NO: 408 - protein, 9 aa, Artificial Sequence
  TLR4 peptide
KGYDWLVVG

SEQ ID NO: 409 - protein, 10 aa, Artificial Sequence
  TLR4 peptide
EDMVYRIGVP

SEQ ID NO: 410 - protein, 6 aa, Artificial Sequence
  TLR4 peptide
VKLSGS

SEQ ID NO: 411 - protein, 8 aa, Artificial Sequence
  TLR4 peptide
GMLSLALF

SEQ ID NO: 412 - protein, 7 aa, Artificial Sequence
  TLR4 peptide
CVVGSVR

SEQ ID NO: 413 - protein, 8 aa, Artificial Sequence
  TLR4 peptide
IVRGCLGW

SEQ ID NO: 414 - protein, 8 aa, Artificial Sequence
  TLR4 peptide
AAEERTLG

SEQ ID NO: 415 - protein, 9 aa, Artificial Sequence
  TLR4 peptide
WARVVGWLR

SEQ ID NO: 416 - protein, 9 aa, Artificial Sequence
  TLR4 peptide
SEGYRLFGG

SEQ ID NO: 417 - protein, 10 aa, Artificial Sequence
  TLR4 peptide
LVGGVVRRGS

SEQ ID NO: 418 - protein, 10 aa, Artificial Sequence
  TLR4 peptide
GRVNDLWLAA

SEQ ID NO: 419 - protein, 10 aa, Artificial Sequence
  TLR4 peptide
SGWMLWREGS

SEQ ID NO: 420 - protein, 10 aa, Artificial Sequence
  TLR4 peptide
ERMEDRGGDL

SEQ ID NO: 421 - protein, 9 aa, Artificial Sequence
  TLR4 peptide
KLCCFTECM

SEQ ID NO: 422 - protein, 10 aa, Artificial Sequence
  TLR4 peptide
AVGSMERGRG

SEQ ID NO: 423 - protein, 9 aa, Artificial Sequence
  TLR4 peptide
RDWVGGDLV

SEQ ID NO: 424 - protein, 10 aa, Artificial Sequence
  TLR4 peptide
FFEVAKISQQ

SEQ ID NO: 425 - protein, 5 aa, Artificial Sequence
  TLR4 peptide
WWYWC

SEQ ID NO: 426 - protein, 7 aa, Artificial Sequence
  TLR4 peptide
MHLCSHA

SEQ ID NO: 427 - protein, 7 aa, Artificial Sequence
  TLR4 peptide
WLFRRIG

SEQ ID NO: 428 - protein, 7 aa, Artificial Sequence
  TLR4 peptide
YWFWRIG

SEQ ID NO: 429 - protein, 7 aa, Artificial Sequence
  TLR4 peptide
MHLYCIA

SEQ ID NO: 430 - protein, 8 aa, Artificial Sequence
  TLR4 peptide
WPLFPWIV

SEQ ID NO: 431 - protein, 7 aa, Artificial Sequence
  TLR4 peptide
DMRSHAR

SEQ ID NO: 432 - protein, 7 aa, Artificial Sequence
  TLR4 peptide
MHLCTHA

SEQ ID NO: 433 - protein, 6 aa, Artificial Sequence
  TLR4 peptide
NLFPFY

SEQ ID NO: 434 - protein, 7 aa, Artificial Sequence
  TLR4 peptide
MHLCTRA

SEQ ID NO: 435 - protein, 7 aa, Artificial Sequence
  TLR4 peptide
RHLWYHA

SEQ ID NO: 436 - protein, 7 aa, Artificial Sequence
  TLR4 peptide
WPFSAYW

SEQ ID NO: 437 - protein, 6 aa, Artificial Sequence
  TLR4 peptide
WYLRGS

SEQ ID NO: 438 - protein, 7 aa, Artificial Sequence
  TLR4 peptide
GKGTDLG

SEQ ID NO: 439 - protein, 6 aa, Artificial Sequence
  TLR4 peptide
IFVRMR

SEQ ID NO: 440 - protein, 7 aa, Artificial Sequence
  TLR4 peptide
WLFRPVF

SEQ ID NO: 441 - protein, 7 aa, Artificial Sequence
  TLR4 peptide
FLGWLMG

SEQ ID NO: 442 - protein, 7 aa, Artificial Sequence
  TLR4 peptide
MHLWHHA

SEQ ID NO: 443 - protein, 7 aa, Artificial Sequence
  TLR4 peptide
WWFPWKA

SEQ ID NO: 444 - protein, 7 aa, Artificial Sequence
  TLR4 peptide
WYLPWLG

SEQ ID NO: 445 - protein, 7 aa, Artificial Sequence
  TLR4 peptide
WPFPRTF

SEQ ID NO: 446 - protein, 7 aa, Artificial Sequence
  TLR4 peptide
WPFPAYW

SEQ ID NO: 447 - protein, 7 aa, Artificial Sequence
  TLR4 peptide
FLGLRWL

SEQ ID NO: 448 - protein, 10 aa, Artificial Sequence
  TLR4 peptide
SRTDVGVLEV

SEQ ID NO: 449 - protein, 10 aa, Artificial Sequence
  TLR4 peptide
REKVSRGDKG

SEQ ID NO: 450 - protein, 10 aa, Artificial Sequence
  TLR4 peptide
DWDAVESEYM

SEQ ID NO: 451 - protein, 10 aa, Artificial Sequence
  TLR4 peptide
VSSAQEVRVP

SEQ ID NO: 452 - protein, 10 aa, Artificial Sequence
  TLR4 peptide
LTYGGLEALG

SEQ ID NO: 453 - protein, 10 aa, Artificial Sequence
  TLR4 peptide
VEEYSSSGVS

SEQ ID NO: 454 - protein, 10 aa, Artificial Sequence
  TLR4 peptide
VCEVSDSVMA

SEQ ID NO: 455 - protein, 5 aa, Artificial Sequence
  TLR2 peptide
NPPTT

SEQ ID NO: 456 - protein, 5 aa, Artificial Sequence
  TLR2 peptide
MRRIL

SEQ ID NO: 457 - protein, 4 aa, Artificial Sequence
  TLR2 peptide
MISS

SEQ ID NO: 458 - protein, 5 aa, Artificial Sequence
  TLR2 peptide
RGGSK

SEQ ID NO: 459 - protein, 4 aa, Artificial Sequence
  TLR2 peptide
RGGF

SEQ ID NO: 460 - protein, 5 aa, Artificial Sequence
  TLR2 peptide
NRTVF

SEQ ID NO: 461 - protein, 5 aa, Artificial Sequence
  TLR2 peptide
NRFGL

SEQ ID NO: 462 - protein, 5 aa, Artificial Sequence
  TLR2 peptide
SRHGR

SEQ ID NO: 463 - protein, 5 aa, Artificial Sequence
  TLR2 peptide
IMRHP

SEQ ID NO: 464 - protein, 5 aa, Artificial Sequence
  TLR2 peptide
EVCAP

SEQ ID NO: 465 - protein, 5 aa, Artificial Sequence
  TLR2 peptide
ACGVY

SEQ ID NO: 466 - protein, 5 aa, Artificial Sequence
  TLR2 peptide
CGPKL

SEQ ID NO: 467 - protein, 5 aa, Artificial Sequence
  TLR2 peptide
AGCFS

SEQ ID NO: 468 - protein, 5 aa, Artificial Sequence
  TLR2 peptide
SGGLF

SEQ ID NO: 469 - protein, 5 aa, Artificial Sequence
  TLR2 peptide
AVRLS

SEQ ID NO: 470 - protein, 5 aa, Artificial Sequence
  TLR2 peptide
GGKLS

SEQ ID NO: 471 - protein, 5 aa, Artificial Sequence
  TLR2 peptide
VSEGV

SEQ ID NO: 472 - protein, 5 aa, Artificial Sequence
  TLR2 peptide
KCQSF

SEQ ID NO: 473 - protein, 5 aa, Artificial Sequence
  TLR2 peptide
FCGLG

SEQ ID NO: 474 - protein, 5 aa, Artificial Sequence
  TLR2 peptide
PESGV

SEQ ID NO: 475 - protein, 5 aa, Artificial Sequence
  TLR2 peptide
DPDSG

SEQ ID NO: 476 - protein, 5 aa, Artificial Sequence
  TLR2 peptide
IGRFR

SEQ ID NO: 477 - protein, 5 aa, Artificial Sequence
  TLR2 peptide
MGTLP

SEQ ID NO: 478 - protein, 5 aa, Artificial Sequence
  TLR2 peptide
ADTHQ

SEQ ID NO: 479 - protein, 5 aa, Artificial Sequence
  TLR2 peptide
HLLPG

SEQ ID NO: 480 - protein, 5 aa, Artificial Sequence
  TLR2 peptide
GPLLH

SEQ ID NO: 481 - protein, 5 aa, Artificial Sequence
  TLR2 peptide
NYRRW

SEQ ID NO: 482 - protein, 5 aa, Artificial Sequence
  TLR2 peptide
LRQGR

SEQ ID NO: 483 - protein, 5 aa, Artificial Sequence
  TLR2 peptide
IMWFP

SEQ ID NO: 484 - protein, 5 aa, Artificial Sequence
  TLR2 peptide
RVVAP

SEQ ID NO: 485 - protein, 5 aa, Artificial Sequence
  TLR2 peptide
IHVVP

SEQ ID NO: 486 - protein, 5 aa, Artificial Sequence
  TLR2 peptide
MFGVP

SEQ ID NO: 487 - protein, 5 aa, Artificial Sequence
  TLR2 peptide
CVWLQ

SEQ ID NO: 488 - protein, 5 aa, Artificial Sequence
  TLR2 peptide
IYKLA

SEQ ID NO: 489 - protein, 4 aa, Artificial Sequence
  TLR2 peptide
KGWF

SEQ ID NO: 490 - protein, 5 aa, Artificial Sequence
  TLR2 peptide
KYMPH

SEQ ID NO: 491 - protein, 5 aa, Artificial Sequence
  TLR2 peptide
VGKND

SEQ ID NO: 492 - protein, 5 aa, Artificial Sequence
  TLR2 peptide
THKPK

SEQ ID NO: 493 - protein, 5 aa, Artificial Sequence
  TLR2 peptide
SHIAL

SEQ ID NO: 494 - protein, 5 aa, Artificial Sequence
  TLR2 peptide
AWAGT

SEQ ID NO: 495 - protein, 20 aa, Artificial Sequence
  TLR2 peptide
KGGVGPVRRSSRLRRTTQPG

SEQ ID NO: 496 - protein, 23 aa, Artificial Sequence
  TLR2 peptide
GRRGLCRGCRTRGRIKQLQSAHK

SEQ ID NO: 497 - protein, 22 aa, Artificial Sequence
  TLR2 peptide
RWGYHLRDRKYKGVRSHKGVPR

SEQ ID NO: 498 - DNA, 1518 bp, S. typhimurium; identical to SEQ ID NO: 178

SEQ ID NO: 499 - protein, 277 aa, S. typhimurium; identical to SEQ ID NO: 313

SEQ ID NO: 500 - DNA, 832 bp, S. typhimurium
atggcacaagtaatcaacactaacagtctgtcgctgctgacccagaataacctgaacaaatcccagtccgcactgggcaccgctatcgagcgtctgtcttctggtctgcgtatcaacagcgcgaaagacgatgcggcaggtcaggcgattgctaaccgtttcaccgcgaacatcaaaggtctgactcaggcttcccgtaacgctaacgacggtatctccattgcgcagaccactgaaggcgcgctgaacgaaatcaacaacaacctgcagcgtgtgcgtgaactggcggttcagtctgctaacagcaccaactcccagtctgacctcgactccatccaggctgaaatcacccagcgcctgaacgaaatcgaccgtgtatccggccagactcagttcaacggcgtgaaagtcctggcgcaggacaacaccctgaccatccaggttggcgccaacgacggtgaaactatcgatatcgatctgaagcagatcaactctcagaccctgggtctggactcactgaacgtgcatggagcgccggtggatcctgctagcccatggaccgaaaacccgctgcagaaaattgatgccgcgctggcgcaggtggatgcgctgcgctctgatctgggtgcggtacaaaaccgtttcaactctgctatcaccaacctgggcaataccgtaaacaatctgtctgaagcgcgtagccgtatcgaagattccgactacgcgaccgaagtttccaacatgtctcgcgcgcagattttgcagcaggccggtacttccgttctggcgcaggctaaccaggtcccgcagaacgtgctgtctctgttacgtg

SEQ ID NO: 501 - protein, 595 aa, E. coli
MAQVINTNSLSLITQNNINKNQSALSSSIERLSSGLRINSAKDDAAGQAIANRFTSNIKGLTQAARNANDGISVAQTTEGALSEINNNLQRIRELTVQASTGTNSDSDLDSIQDEIKSRLDEIDRVSGQTQFNGVNVLAKDGSMKIQVGANDGQTITIDLKKIDSDTLGLNGFNVNGSGTIANKAATISDLTAAKMDAATNTITTTNNALTASKALDQLKDGDTVTIKADAAQTATVYTYNASAGNFSLSNVSNNTSEKAGDVAASLLPPAGQTASGVYKAASGEVNFDVDANGKITIGGQKAYLTSDGNLTTNDAGGATAATLDGLFKKAGDGQSIGFKKTASVTMGGTTYNFKTGADADAATANAGVSFTDTASKETVLNKVATAKQGKAAAADGDTSATITYKSGVQTYQAVFAAGDGTASAKYADKADVSNATATYTDADGEMTTIGSYTTKYSIDANNGKVTVDSGTGTGKYAPKVGAEVYVSANGTLTTDATSEGTVTKDPLKALDEAISSIDKFRSSLGAIQNRLDSAVTNLNNTTTNLSEAQSRIQDADYATEVSNMSKAQIIQQAGNSVLAKANQVPQQVLSLLQG

SEQ ID NO: 502 - DNA, 1788 bp, E. coli
atggcacaagtcattaataccaacagcctctcgctgatcactcaaaataatatcaacaagaaccagtctgcgctgtcgagttctatcgagcgtctgtcttctggcttgcgtattaacagcgcgaaggatgacgccgcaggtcaggcgattgctaaccgttttacttctaacattaaaggcctgactcaggctgcacgtaacgccaacgacggtatttccgttgcgcagaccaccgaaggcgcgctgtccgaaatcaacaacaacttacagcgtatccgtgaactgacggttcaggcttctaccgggactaactccgattcagatctggactccattcaggacgaaatcaaatcccgtctggacgaaattgaccgcgtatctggccagacccagttcaacggcgtgaacgtactggcgaaagacggttcaatgaaaattcaggttggtgcgaatgacggccagactatcacgattgatctgaagaaaattgactcagatacgctggggctgaatggttttaacgtgaatggttccggtacgatagccaataaagcggcgaccattagcgacctgacagcagcgaaaatggatgctgcaactaatactataactacaacaaataatgcgctgactgcatcaaaggcgcttgatcaactgaaagatggtgacactgttactatcaaagcagatgctgctcaaactgccacggtttatacatacaatgcatcagctggtaacttctcactcagtaatgtatcgaataatacttcagaaaaagcaggtgatgtagcagctagccttctcccgccggctgggcaaactgctagtggtgtttataaagcagcaagcggtgaagtgaactttgatgttgatgcgaatggtaaaatcacaatcggaggacagaaagcatatttaactagtgatggtaacttaactacaaacgatgctggtggtgcgactgcggctacgcttgatggtttattcaagaaagctggtgatggtcaatcaatcgggtttaagaagactgcatcagtcacgatggggggaacaacttataactttaaaacgggtgctgatgctgatgctgcaactgctaacgcaggggtatcgttcactgatacagctagcaaagaaaccgttttaaataaagtggctacagctaaacaaggcaaagcagctgcagctgacggtgatacatccgcaacaattacctataaatctggcgttcagacgtatcaggctgtatttgccgcaggtgacggtactgctagcgcaaaatatgccgataaagctgacgtttctaatgcaacagcaacatacactgatgctgatggtgaaatgactacaattggttcatacaccacgaagtattcaatcgatgctaacaacggcaaggtaactgttgattctggaactggtacgggtaaatatgcgccgaaagtaggggctgaagtatatgttagtgctaatggtactttaacaacagatgcaactagcgaaggcacagtaacaaaagatccactgaaagctctggatgaagctatcagctccatcgacaaattccgttcttccctgggtgctatccagaaccgtctggattccgcagtcaccaacctgaacaacaccactaccaacctgtccgaagcgcagtcccgtattcaggacgccgactatgcgaccgaagtgtccaacatgtcgaaagcgcagatcattcagcaggccggtaactccgtgctggcaaaagccaaccaggtaccgcagcaggttctgtctctgctgcagggttag

SEQ ID NO: 503 - protein, 506 aa, s. muenchen
MAQVINTNSLSLLTQNNLNKSQSALGTAIERLSSGLRINSAKDDAAGQAIANRFTANIKGLTQASRNANDGISIAQTTEGALNEINNNLQRVRELAVQSANGTNSQSDLDSIQAEITQRLNEIDRVSGQTQFNGVKVLAQDNTLTIQVGANDGETIDIDLKEISSKTLGLDKLNVQDAYTPKETAVTVDKTTYKNGTDTITAQSNTDIQTAIGGGATGVTGADIKFKDGQYYLDVKGGASAGVYKATYDETTKKVNIDTTDKTPLATAEATAIRGTATITHNQIAEVTKEGVDTTTVAAQLAAAGVTGADKDNTSLVKLSFEDKNGKVIDGGYAVKMGDDFYAATYDEKTGTITAKTTTYTDGAGVAQTGAVKFGGANGKSEVVTATDGKTYLASDLDKHNFRTGGELKEVNTDKTENPLQKIDAALAQVDTLRSDLGAVQNRFNSAITNLGNTVNNLSSARSRIEDSDYATEVSNMSRAQILQQAGTSVLAQANQVPQNVLSLLR

SEQ ID NO: 504 - DNA, 1522 bp, s. muenchen
aatggcacaagtcattaatacaaacagcctgtcgctgttgacccagaataacctgaacaaatcccagtccgctctgggcaccgctatcgagcgtctgtcttccggtctgcgtatcaacagcgcgaaagacgatgcggcaggtcaggcgattgctaaccgtttcaccgcgaacatcaaaggtctgactcaggcttcccgtaacgctaacgacggtatctccattgcgcagaccactgaaggcgcgctgaacgaaatcaacaacaacctgcagcgtgtgcgtgaactggcggttcagtctgctaacggtactaactcccagtctgaccttgactctatccaggctgaaatcacccagcgtctgaacgaaatcgaccgtgtatccggtcagactcagttcaacggcgtgaaagtcctggcgcaggacaacaccctgaccatccaggttggtgccaacgacggtgaaactattgatattgatttaaaagaaattagctctaaaacactgggacttgataagcttaatgtccaggatgcctacaccccgaaagaaactgctgtaaccgttgataaaactacctataaaaatggtacagatactattacagcccagagcaatactgatatccaaactgcaattggcggtggtgcaacgggggttactggggctgatatcaaatttaaagatggtcaatactatttagatgttaaaggcggtgcttctgctggtgtttataaagccacttatgatgaaactacaaagaaagttaatattgatacgactgataaaactccgttagcaactgcggaagctacagctattcggggaacggccactataacccacaaccaaattgctgaagtaacaaaagagggtgttgatacgaccacagttgcggctcaacttgctgctgcaggggttactggtgccgataaggacaatactagccttgtaaaactatcgtttgaggataaaaacggtaaggttattgatggtggctatgcagtgaaaatgggcgacgatttctatgccgctacatatgatgagaaaacaggtacaattactgctaaaacaaccacttatacagatggtgctggcgttgctcaaactggagctgtgaaatttggtggcgcaaatggtaaatctgaagttgttactgctaccgatggtaaaacttacttagcaagcgaccttgacaaacataacttcagaacaggcggtgagcttaaagaggttaatacagataagactgaaaacccactgcagaaaattgatgctgccttggcacaggttgatacacttcgttctgacctgggtgcggtacagaaccgtttcaactccgctatcaccaacctgggcaataccgtaaataacctgtcttctgcccgtagccgtatcgaagattccgactacgcgaccgaagtctccaacatgtctcgcgcgcagattctgcagcaggccggtacctccgttctggcgcaggctaaccaggttccgcaaaacgtcctctctttactgcgttaa

SEQ ID NO: 505 - protein, 588 aa, Artificial Sequence
  pMT/STF2
MKLCILLAVVAFVGLSLGRSAQVINTNSLSLLTQNNLNKSQSALGTAIERLSSGLRINSAKDDAAGQAIANRFTANIKGLTQASRNANDGISIAQTTEGALNEINNNLQRVRELAVQSANSTNSQSDLDSIQAEITQRLNEIDRVSGQTQFNGVKVLAQDNTLTIQVGANDGETIDIDLKQINSQTLGLDSLNVQKAYDVKDTAVTTKAYANNGTTLDVSGLDDAAIKAATGGTNGTASVTGGAVKFDADNNKYFVTIGGFTGADAAKNGDYEVNVATDGTVTLAAGATKTTMPAGATTKTEVQELKDTPAVVSADAKNALIAGGVDATDANGAELVKMSYTDKNGKTIEGGYALKAGDKYYAADYDEATGAIKAKTTSYTAADGTTKTAANQLGGVDGKTEVVTIDGKTYNASKAAGHDFKAQPELAEAAAKTTENPLQKIDAALAQVDALRSDLGAVQNRFNSAITNLGNTVNNLSEARSRIEDSDYATEVSNMSRAQILQQAGTSVLAQANQVPQNVLSLLRKGNSKLEGQLEFPRTSPVWWNSADIQHSGGRSSLEGPRFEGKPIPNPLLGLDSTRTGHHHHHH

SEQ ID NO: 506 - DNA, 1764 bp, Artificial Sequence
  pMT/STF2
atgaagttatgcatattactggccgtcgtggcctttgttggcctctcgctcgggagatctgcacaagtaatcaacactaacagtctgtcgctgctgacccagaataacctgaacaaatcccagtccgcactgggcaccgctatcgagcgtctgtcttctggtctgcgtatcaacagcgcgaaagacgatgcggcaggtcaggcgattgctaaccgtttcaccgcgaacatcaaaggtctgactcaggcttcccgtaacgctaacgacggtatctccattgcgcagaccactgaaggcgcgctgaacgaaatcaacaacaacctgcagcgtgtgcgtgaactggcggttcagtctgctaacagcaccaactcccagtctgacctcgactccatccaggctgaaatcacccagcgcctgaacgaaatcgaccgtgtatccggccagactcagttcaacggcgtgaaagtcctggcgcaggacaacaccctgaccatccaggttggcgccaacgacggtgaaactatcgatatcgatctgaagcagatcaactctcagaccctgggtctggactcactgaacgtgcagaaagcgtatgatgtgaaagatacagcagtaacaacgaaagcttatgccaataatggtactacactggatgtatcgggtcttgatgatgcagctattaaagcggctacgggtggtacgaatggtacggcttctgtaaccggtggtgcggttaaatttgacgcagataataacaagtactttgttactattggtggctttactggtgctgatgccgccaaaaatggcgattatgaagttaacgttgctactgacggtacagtaacccttgcggctggcgcaactaaaaccacaatgcctgctggtgcgacaactaaaacagaagtacaggagttaaaagatacaccggcagttgtttcagcagatgctaaaaatgccttaattgctggcggcgttgacgctaccgatgctaatggcgctgagttggtcaaaatgtcttataccgataaaaatggtaagacaattgaaggcggttatgcgcttaaagctggcgataagtattacgccgcagattacgatgaagcgacaggagcaattaaagctaaaactacaagttatactgctgctgacggcactaccaaaacagcggctaaccaactgggtggcgtagacggtaaaaccgaagtcgttactatcgacggtaaaacctacaatgccagcaaagccgctggtcatgatttcaaagcacaaccagagctggcggaagcagccgctaaaaccaccgaaaacccgctgcagaaaattgatgccgcgctggcgcaggtggatgcgctgcgctctgatctgggtgcggtacaaaaccgtttcaactctgctatcaccaacctgggcaataccgtaaacaatctgtctgaagcgcgtagccgtatcgaagattccgactacgcgaccgaagtttccaacatgtctcgcgcgcagattctgcagcaggccggtacttccgttctggcgcaggctaaccaggtcccgcagaacgtgctgtctctgttacgtaagggcaattcgaagcttgaaggtcaattggaattccctaggactagtccagtgtggtggaattctgcagatatccagcacagtggcggccgctcgagtctagagggcccgcggttcgaaggtaagcctatccctaaccctctcctcggtctcgattctacgcgtaccggtcatcatcaccatcaccat

SEQ ID NO: 507 - protein, 97 aa, Artificial Sequence
  M2 Influenza A
MSLLTEVETPIRNEWGCRCNDSSDPLVVAASIIGILHLILWILDRLFFKCIYRLFKHGLKRGPSTEGVPESMREEYRKEQQNAVDADDSHFVSIELE

SEQ ID NO: 508 - DNA, 294 bp, Artificial Sequence
  M2 Influenza A
atgagccttctaaccgaggtcgaaacacctatcagaaacgaatgggggtgcagatgcaacgattcaagtgacccgcttgttgttgccgcgagtatcattgggatcttgcacttgatattgtggattcttgatcgtctttttttcaaatgcatctatcgactcttcaaacacggccttaaaagagggccttctacggaaggagtacctgagtctatgagggaagaatatcgaaaggaacagcagaatgctgtggatgctgacgacagtcattttgtcagcatagagttggagtaa

SEQ ID NO: 509 - protein, 24 aa, Artificial Sequence
  M2
SLLTEVETPIRNEWGCRCNDSSDP

SEQ ID NO: 510 - DNA, 75 bp, Artificial Sequence
  M2
atgagcctgctgaccgaggtcgaaacaccgatccgcaacgaatgggggtgccgctgcaacgattcaagtgacccg

SEQ ID NO: 511 - protein, 11 aa, Artificial Sequence
  M2
EVETPIRNEWG

SEQ ID NO: 512 - DNA, 30 bp, Artificial Sequence
  M2
gaggtcgaaacacctatcagaaacgaatgg

SEQ ID NO: 513 - DNA, 315 bp, Artificial Sequence
  4XM2e
agcttgctgactgaggttgagaccccgattcgcaacgaatggggttcccgttccaacgattcttccgacccgctcgagagcctgttgaccgaggttgaaacccctatccgtaatgaatggggctcccgtagcaacgactcttctgacccaggatcctccctcttgaccgaagtggaaacgcctattcgtaatgagtggggttctcgtagcaatgacagctcggacccggagctctcgctgctgacggaagtggagactccgatccgtaacgagtggggctctcgctctaacgatagctcagacccgtctagataa

SEQ ID NO: 514 - protein, 104 aa, Artificial Sequence
  4XM2e
SLLTEVETPIRNEWGSRSNDSSDPLESLLTEVETPIRNEWGSRSNDSSDPGSSLLTEVETPIRNEWGSRSNDSSDPELSLLTEVETPIRNEWGSRSNDSSDPSR

SEQ ID NO: 515 - protein, 9 aa, Artificial Sequence
  M2
EVETPIRNE

SEQ ID NO: 516 - protein, 8 aa, Artificial Sequence
  M2
EVETPIRN

SEQ ID NO: 517 - protein, 24 aa, Artificial Sequence
  M2
MKATKLVLGAVILGSTLLAGCSSN

SEQ ID NO: 518 - DNA, 75 bp, Artificial Sequence
  M2
atgaaagctactaaactggtactgggcgcggtaatcctgggttctactctgctgctggcaggttgctccagcaac

SEQ ID NO: 519 - DNA, 48 bp, Artificial Sequence
  Linker
aagggcaattcgaagcttgaaggtcaattggaattccctaggactagt

SEQ ID NO: 520 - protein, 16 aa, Artificial Sequence
  Linker
KGNSKLEGQLEFPRTS

SEQ ID NO: 521 - DNA, 36 bp, Artificial Sequence
  Linker
gaattctgcagatatccagcacagtggcggccgctc

SEQ ID NO: 522 - protein, 12 aa, Artificial Sequence
  Linker
EFCRYPAQWRPL

SEQ ID NO: 523 - protein, 12 aa, Artificial Sequence
  Linker
EFSRYPAQWRPL

SEQ ID NO: 524 - DNA, 36 bp, Artificial Sequence
  Linker
gaattctctagatatccagcacagtggcggccgctc

SEQ ID NO: 525 - protein, 45 aa, Artificial Sequence
  Linker
KGNSKLEGQLEFPRTSPVWWNSADIQHSGGRQCDGYLQNSPLRPL

SEQ ID NO: 526 - DNA, 135 bp, Artificial Sequence
  Linker
aagggcaattcgaagcttgaaggtcaattggaattccctaggactagtccagtgtggtggaattctgcagatatccagcacagtggcggccgccagtgtgatggatatctgcagaattcgcccttgcggccgctc

SEQ ID NO: 527 - protein, 611 aa, Artificial Sequence; identical to SEQ ID NO: 94
  STF2-4XM2e

SEQ ID NO: 528 - DNA, 1836 bp, Artificial Sequence
  STF2-4XM2e
atggcacaagtaatcaacactaacagtctgtcgctgctgacccagaataacctgaacaaatcccagtccgcactgggcaccgctatcgagcgtctgtcttctggtctgcgtatcaacagcgcgaaagacgatgcggcaggtcaggcgattgctaaccgtttcaccgcgaacatcaaaggtctgactcaggcttcccgtaacgctaacgacggtatctccattgcgcagaccactgaaggcgcgctgaacgaaatcaacaacaacctgcagcgtgtgcgtgaactggcggttcagtctgctaacagcaccaactcccagtctgacctcgactccatccaggctgaaatcacccagcgcctgaacgaaatcgaccgtgtatccggccagactcagttcaacggcgtgaaagtcctggcgcaggacaacaccctgaccatccaggttggcgccaacgacggtgaaactatcgatatcgatctgaagcagatcaactctcagaccctgggtctggactcactgaacgtgcagaaagcgtatgatgtgaaagatacagcagtaacaacgaaagcttatgccaataatggtactacactggatgtatcgggtcttgatgatgcagctattaaagcggctacgggtggtacgaatggtacggcttctgtaaccggtggtgcggttaaatttgacgcagataataacaagtactttgttactattggtggctttactggtgctgatgccgccaaaaatggcgattatgaagttaacgttgctactgacggtacagtaacccttgcggctggcgcaactaaaaccacaatgcctgctggtgcgacaactaaaacagaagtacaggagttaaaagatacaccggcagttgtttcagcagatgctaaaaatgccttaattgctggcggcgttgacgctaccgatgctaatggcgctgagttggtcaaaatgtcttataccgataaaaatggtaagacaattgaaggcggttatgcgcttaaagctggcgataagtattacgccgcagattacgatgaagcgacaggagcaattaaagctaaaaccacaagttatactgctgctgacggcactaccaaaacagcggctaaccaactgggtggcgtagacggtaaaaccgaagtcgttactatcgacggtaaaacctacaatgccagcaaagccgctggtcatgatttcaaagcacaaccagagctggcggaagcagccgctaaaaccaccgaaaacccgctgcagaaaattgatgccgcgctggcgcaggtggatgcgctgcgctctgatctgggtgcggtacaaaaccgtttcaactctgctatcaccaacctgggcaataccgtaaacaatctgtctgaagcgcgtagccgtatcgaagattccgactacgcgaccgaagtttccaacatgtctcgcgcgcagattttgcagcaggccggtacttccgttctggcgcaggctaaccaggtcccgcagaacgtgctgtctctgttacgtctgagcttgctgactgaggttgagaccccgattcgcaacgaatggggttcccgttccaacgattcttccgacccgctcgagagcctgttgaccgaggttgaaacccctatccgtaatgaatggggctcccgtagcaacgactcttctgacccaggatcctccctcttgaccgaagtggaaacgcctattcgtaatgagtggggttctcgtagcaatgacagctcggacccggagctctcgctgctgacggaagtggagactccgatccgtaacgagtggggctctcgctctaacgatagctcagacccgtctagataa

SEQ ID NO: 529 - protein, 19 aa, Artificial Sequence
  HA
PAKLLKERGRRGAIAGFLE

SEQ ID NO: 530 - protein, 10 aa, Artificial Sequence
  HA
EVETPIRNEW

SEQ ID NO: 531 - protein, 26 aa, Artificial Sequence
  HA FluB
SLWSEEPAKLLKERGFFGAIAGFLEE

SEQ ID NO: 532 - protein, 26 aa, Artificial Sequence
  HA FluA H1/H0
SLWSEENIPSIQSRGLFGAIAGFIEE

SEQ ID NO: 533 - protein, 26 aa, Artificial Sequence
  HA FluA H3/H0
SLWSEENVPEKQTRGIFGAIAGFIEE

SEQ ID NO: 534 - protein, 30 aa, Artificial Sequence
  HA Flu A H5/H0
SLWSEEEWEERERRRKKRGLFGAIAGFIEE

SEQ ID NO: 535 - protein, 24 aa, Artificial Sequence
  M2
SLLTEVETPTRNEWESRSSDSSDP

SEQ ID NO: 536 - protein, 24 aa, Artificial Sequence
  M2
SLLTEVETPTRNEWECRCSDSSDP

SEQ ID NO: 537 - protein, 24 aa, Artificial Sequence
  M2
SLLTEVETLTRNGWGSRSSDSSDP

SEQ ID NO: 538 - protein, 24 aa, Artificial Sequence
  M2
SLLTEVETLTRNGWGCRCSDSSDP

SEQ ID NO: 539 - protein, 24 aa, Artificial Sequence
  M2
SLLTEVETPTRNGWESKSSDSSDP

SEQ ID NO: 540 - protein, 24 aa, Artificial Sequence
  M2
SLLTEVETPTRNGWECKCSDSSDP

SEQ ID NO: 541 - protein, 24 aa, Artificial Sequence
  M2
SLLTEVETLTRNGWESKSRDSSDP

SEQ ID NO: 542 - protein, 24 aa, Artificial Sequence
  M2
SLLTEVETLTRNGWECKCRDSSDP

SEQ ID NO: 543 - protein, 24 aa, Artificial Sequence
  M2
SLLTEVETPIRNEWGSRSNDSSDP

SEQ ID NO: 544 - protein, 24 aa, Artificial Sequence
  M2
SLLTEVETPIRNEWGCRCNGSSDP

SEQ ID NO: 545 - protein, 24 aa, Artificial Sequence
  M2
SLLTEVETPIRNEWGCKCNDSSDP

SEQ ID NO: 546 - protein, 24 aa, Artificial Sequence
  M2
SLLTEVETPIRNEWGCRCNDSSDP

SEQ ID NO: 547 - protein, 24 aa, Artificial Sequence
  M2
SLLTEVETPIRNEWGCRCNDSSDP

SEQ ID NO: 548 - protein, 24 aa, Artificial Sequence
  M2
SLLTEVETPIRNEWECRCNGSSDP

SEQ ID NO: 549 - protein, 24 aa, Artificial Sequence
  M2
SLLTEVETPTRNEWECRCSDSSDP

SEQ ID NO: 550 - protein, 24 aa, Artificial Sequence
  M2
SLLTEVETPIRNEWGSRSNGSSDP

SEQ ID NO: 551 - protein, 24 aa, Artificial Sequence
  M2
SLLTEVETLTRNGWGCRCSDSSDP

SEQ ID NO: 552 - protein, 24 aa, Artificial Sequence
  M2
SLLTEVETPTRNEWECRCSDSSDP

SEQ ID NO: 553 - protein, 24 aa, Artificial Sequence
  M2
SLLTEVETPTRNGWECKCSDSSDP

SEQ ID NO: 554 - protein, 24 aa, Artificial Sequence
  M2
SLLTEVETPTRNGWGCRCSGSSDP

SEQ ID NO: 555 - protein, 24 aa, Artificial Sequence
  M2
SLLTEVETLTRNGWECKCRDSSDP

SEQ ID NO: 556 - protein, 811 aa, Artificial Sequence
  STF2delta.HA
MAQVINTNSLSLLTQNNLNKSQSALGTAIERLSSGLRINSAKDDAAGQAIANRFTANIKGLTQASRNANDGISIAQTTEGALNEINNNLQRVRELAVQSANSTNSQSDLDSIQAEITQRLNEIDRVSGQTQFNGVKVLAQDNTLTIQVGANDGETIDIDLKQINSQTLGLDSLNVHGAPVDPASPWTENPLQKIDAALAQVDALRSDLGAVQNRFNSAITNLGNTVNNLSEARSRIEDSDYATEVSNMSRAQILQQAGTSVLAQANQVPQNVLSLLREFSRYPAQWRPLDQICIGYHANNSTEQVDTIMEKNVTVTHAQDILEKKHNGKLCDLDGVKPLILRDCSVAGWLLGNPMCDEFINVPEWSYIVEKANPVNDLCYPGDFNDYEELKHLLSRINHFEKIQIIPKSSWSSHEASLGVSSACPYQGKSSFFRNVVWLIKKNSTYPTIKRSYNNTNQEDLLVLWGIHHPNDAAEQTKLYQNPTTYISVGTSTLNQRLVPRIATRSKVNGQSGRMEFFWTILKPNDAINFESNGNFIAPEYAYKIVKKGDSTIMKSELEYGNCNTKCQTPMGAINSSMPFHNIHPLTIGECPKYVKSNRLVLATGLRNSPQRERRRKKRGLFGAIAGFIEGGWQGMVDGWYGYHHSNEQGSGYAADKESTQKAIDGVTNKVNSIIDKMNTQFEAVGREFNNLERRIENLNKKMEDGFLDVWTYNAELLVLMENERTLDFHDSNVKNLYDKVRLQLRDNAKELGNGCFEFYHKCDNECMESVRNGTYDYPQYSEEARLKREEISGVKLESIGIYQILSIYST

SEQ ID NO: 557 - DNA, 2439 bp, Artificial Sequence
  STF2delta.HA
atggcacaagtaatcaacactaacagtctgtcgctgctgacccagaataacctgaacaaatcccagtccgcactgggcaccgctatcgagcgtctgtcttctggtctgcgtatcaacagcgcgaaagacgatgcggcaggtcaggcgattgctaaccgtttcaccgcgaacatcaaaggtctgactcaggcttcccgtaacgctaacgacggtatctccattgcgcagaccactgaaggcgcgctgaacgaaatcaacaacaacctgcagcgtgtgcgtgaactggcggttcagtctgctaacagcaccaactcccagtctgacctcgactccatccaggctgaaatcacccagcgcctgaacgaaatcgaccgtgtatccggccagactcagttcaacggcgtgaaagtcctggcgcaggacaacaccctgaccatccaggttggcgccaacgacggtgaaactatcgatatcgatctgaagcagatcaactctcagaccctgggtctggactcactgaacgtgcatggagcgccggtggatcctgctagcccatggaccgaaaacccgctgcagaaaattgatgccgcgctggcgcaggtggatgcgctgcgctctgatctgggtgcggtacaaaaccgtttcaactctgctatcaccaacctgggcaataccgtaaacaatctgtctgaagcgcgtagccgtatcgaagattccgactacgcgaccgaagtttccaacatgtctcgcgcgcagattttgcagcaggccggtacttccgttctggcgcaggctaaccaggtcccgcagaacgtgctgtctctgttacgtgaattctctagatatccagcacagtggcggccgctcgaccagatctgtatcggttatcatgctaacaattctactgaacaagtagatactatcatggagaagaacgttacagttacacatgcacaagatatcctggaaaagaagcataatggaaaactgtgtgaccttgatggtgttaaaccactaatattgcgtgactgctcagttgctgggtggttgttggggaatccaatgtgcgacgaatttatcaacgttccagaatggagttacattgttgaaaaagctaaccctgttaacgacttgtgttacccaggcgattttaatgactacgaggaacttaagcatttgttgtcaagaattaaccacttcgagaaaattcaaattattccaaagtcatcttggtcctcccatgaagcatccctaggagtctcttccgcttgcccttaccaaggcaagagttccttttttcgtaatgtcgtctggctgatcaaaaagaactccacctatccaactataaagagatcatacaacaacacaaatcaggaggatctgctagttctgtggggcattcaccaccccaatgacgcagctgagcagactaaattgtaccaaaacccaactacctatatatcagttggtacctcaactcttaaccagcgactagtcccccgtattgctactaggtcaaaggttaatggtcaaagtggacgaatggagtttttctggactattttgaagcccaacgatgccatcaacttcgaaagtaatggaaatttcatagcccctgagtacgcttacaaaatcgttaaaaagggtgattccactatcatgaaatctgaactggaatacggaaactgtaacaccaaatgccagacgccaatgggtgccatcaactcttctatgccttttcacaacattcatcctttgactattggtgaatgcccaaagtacgtcaaatctaaccgtttggtgttggctactggtctaaggaactcccctcagcgtgaaagaagaagaaagaagaggggattattcggtgctatcgctggatttattgagggaggatggcagggaatggtcgatggctggtatggttaccatcactcaaatgaacagggaagtggatacgcagctgataaagaatctactcaaaaggctatcgacggtgttacaaacaaggtcaattctattatcgataagatgaatacacagtttgaggctgttggtagagagttcaataatcttgagagaagaatcgaaaacctgaacaagaaaatggaagacggatttttagatgtatggacttacaatgctgagttgttggtcttgatggagaatgaacgaacgttggacttccatgactccaatgtgaagaacctatatgacaaagtgaggctgcaacttagagacaacgccaaggaattgggaaacgggtgcttcgagttttaccacaaatgcgacaacgaatgtatggaatcagtgagaaacggtacctatgattacccccaatattccgaggaggcaagactgaagagagaagagatatctggtgtaaagttggaatccatcggtatttatcagattctatctatatattctacctaatag

SEQ ID NO: 558 - protein, 800 aa, Artificial Sequence; identical to SEQ ID NO: 177
  STF2delta.HA (PR8)

SEQ ID NO: 559 - DNA, 2439 bp, Artificial Sequence; identical to SEQ ID NO: 557
  STF2delta.HA (PR8)

SEQ ID NO: 560 - protein, 511 aa, Artificial Sequence; identical to SEQ ID NO: 23
  HA (PR8)

SEQ ID NO: 561 - DNA, 1572 bp, Artificial Sequence
  HA (PR8)
gaccagatctgtatcggttatcatgctaacaattctactgaacaagtagatactatcatggagaagaacgttacagttacacatgcacaagatatcctggaaaagaagcataatggaaaactgtgtgaccttgatggtgttaaaccactaatattgcgtgactgctcagttgctgggtggttgttggggaatccaatgtgcgacgaatttatcaacgttccagaatggagttacattgttgaaaaagctaaccctgttaacgacttgtgttacccaggcgattttaatgactacgaggaacttaagcatttgttgtcaagaattaaccacttcgagaaaattcaaattattccaaagtcatcttggtcctcccatgaagcatccctaggagtctcttccgcttgcccttaccaaggcaagagttccttttttcgtaatgtcgtctggctgatcaaaaagaactccacctatccaactataaagagatcatacaacaacacaaatcaggaggatctgctagttctgtggggcattcaccaccccaatgacgcagctgagcagactaaattgtaccaaaacccaactacctatatatcagttggtacctcaactcttaaccagcgactagtcccccgtattgctactaggtcaaaggttaatggtcaaagtggacgaatggagtttttctggactattttgaagcccaacgatgccatcaacttcgaaagtaatggaaatttcatagcccctgagtacgcttacaaaatcgttaaaaagggtgattccactatcatgaaatctgaactggaatacggaaactgtaacaccaaatgccagacgccaatgggtgccatcaactcttctatgccttttcacaacattcatcctttgactattggtgaatgcccaaagtacgtcaaatctaaccgtttggtgttggctactggtctaaggaactcccctcagcgtgaaagaagaagaaagaagaggggattattcggtgctatcgctggatttattgagggaggatggcagggaatggtcgatggctggtatggttaccatcactcaaatgaacagggaagtggatacgcagctgataaagaatctactcaaaaggctatcgacggtgttacaaacaaggtcaattctattatcgataagatgaatacacagtttgaggctgttggtagagagttcaataatcttgagagaagaatcgaaaacctgaacaagaaaatggaagacggatttttagatgtatggacttacaatgctgagttgttggtcttgatggagaatgaacgaacgttggacttccatgactccaatgtgaagaacctatatgacaaagtgaggctgcaacttagagacaacgccaaggaattgggaaacgggtgcttcgagttttaccacaaatgcgacaacgaatgtatggaatcagtgagaaacggtacctatgattacccccaatattccgaggaggcaagactgaagagagaagagatatctggtgtaaagttggaatccatcggtatttatcagattctatctatatattctacctaatag

SEQ ID NO: 562 - protein, 261 aa, E. coli
MAQVINTNSLSLITQNNINKNQSALSSSIERLSSGLRINSAKDDAAGQAIANRFTSNIKGLTQAARNANDGISVAQTTEGALSEINNNLQRIRELTVQASTGTNSDSDLDSIQDEIKSRLDEIDRVSGQTQFNGVNVLAKDGSMKIQVGANDGQTITIDLKKIDSDTLGTKDPLKALDEAISSIDKFRSSLGAIQNRLDSAVTNLNNTTTNLSEAQSRIQDADYATEVSNMSKAQIIQQAGNSVLAKANQVPQQVLSLLQG

SEQ ID NO: 563 - protein, 522 aa, Artificial Sequence
  H5N1 HA
DQICIGYHANNSTEQVDTIMEKNVTVTHAQDILEKKHNGKLCDLDGVKPLILRDCSVAGWLLGNPMCDEFINVPEWSYIVEKANPVNDLCYPGDFNDYEELKHLLSRINHFEKIQIIPKSSWSSHEASLGVSSACPYQGKSSFFRNVVWLIKKNSTYPTIKRSYNNTNQEDLLVLWGIHHPNDAAEQTKLYQNPTTYISVGTSTLNQRLVPRIATRSKVNGQSGRMEFFWTILKPNDAINFESNGNFIAPEYAYKIVKKGDSTIMKSELEYGNCNTKCQTPMGAINSSMPFHNIHPLTIGECPKYVKSNRLVLATGLRNSPQRERRRKKRGLFGAIAGFIEGGWQGMVDGWYGYHHSNEQGSGYAADKESTQKAIDGVTNKVNSIIDKMNTQFEAVGREFNNLERRIENLNKKMEDGFLDVWTYNAELLVLMENERTLDFHDSNVKNLYDKVRLQLRDNAKELGNGCFEFYHKCDNECMESVRNGTYDYPQYSEEARLKREEISGVKLESIGIYQILSIYST

SEQ ID NO: 564 - DNA, 1572 bp, Artificial Sequence; identical to SEQ ID NO: 561
  H5N1 HA

SEQ ID NO: 565 - DNA, 43 bp, Artificial Sequence
  Primer
  m = a or c
cgctcttcamtgagcttgctgactgaggttgagaccccgattc

SEQ ID NO: 566 - DNA, 50 bp, Artificial Sequence
  Primer
cgctcttcacgcttattatctagacgggtctgagctatcgttagagcgag

SEQ ID NO: 567 - DNA, 41 bp, Artificial Sequence
  Primer
gctcttcagcggctgagcaataactagcataaccccttggg

SEQ ID NO: 568 - DNA, 39 bp, Artificial Sequence
  Primer
cgctcttcacagacgtaacagagacagcacgttctgcgg

SEQ ID NO: 569 - protein, 24 aa, Artificial Sequence
  M2
SLLTEVETPIRNEWGSKSNDSSDP

SEQ ID NO: 570 - protein, 24 aa, Artificial Sequence
  M2
SLLTEVETPIRNEWGSRSNDSSDP

SEQ ID NO: 571 - protein, 24 aa, Artificial Sequence
  M2
SLLTEVETPIRNEWESRSNGSSDP

SEQ ID NO: 572 - protein, 24 aa, Artificial Sequence
  M2
SLLTEVETPTRNEWESRSSDSSDP

SEQ ID NO: 573 - protein, 24 aa, Artificial Sequence
  M2
SLLTEVETLTRNGWGSRSSDSSDP

SEQ ID NO: 574 - protein, 24 aa, Artificial Sequence
  M2
SLLTEVETPTRNEWESRSSDSSDP

SEQ ID NO: 575 - protein, 24 aa, Artificial Sequence
  M2
SLLTEVETPTRNGWESKSSDSSDP

SEQ ID NO: 576 - protein, 24 aa, Artificial Sequence
  M2
SLLTEVETPTRNGWGSRSSGSSDP

SEQ ID NO: 577 - protein, 24 aa, Artificial Sequence
  M2
SLLTEVETLTRNGWESKSRDSSDP

SEQ ID NO: 578 - protein, 641 aa, Artificial Sequence
  pMT/STF2.4XM2e (H1)
MKLCILLAVVAFVGLSLGRSAQVINTNSLSLLTQNNLNKSQSALGTAIERLSSGLRINSAKDDAAGQAIANRFTANIKGLTQASRNANDGISIAQTTEGALNEINNNLQRVRELAVQSANSTNSQSDLDSIQAEITQRLNEIDRVSGQTQFNGVKVLAQDNTLTIQVGANDGETIDIDLKQINSQTLGLDSLNVQKAYDVKDTAVTTKAYANNGTTLDVSGLDDAAIKAATGGTNGTASVTGGAVKFDADNNKYFVTIGGFTGADAAKNGDYEVNVATDGTVTLAAGATKTTMPAGATTKTEVQELKDTPAVVSADAKNALIAGGVDATDANGAELVKMSYTDKNGKTIEGGYALKAGDKYYAADYDEATGAIKAKTTSYTAADGTTKTAANQLGGVDGKTEVVTIDGKTYNASKAAGHDFKAQPELAEAAAKTTENPLQKIDAALAQVDALRSDLGAVQNRFNSAITNLGNTVNNLSEARSRIEDSDYATEVSNMSRAQILQQAGTSVLAQANQVPQNVLSLLRKGNSKLEGQLEFSLLTEVETPIRNEWGSRSNDSSDPLESLLTEVETPIRNEWGSRSNDSSDPGSSLLTEVETPIRNEWGSRSNDSSDPELSLLTEVETPIRNEWGSRSNDSSDPSR

SEQ ID NO: 579 - DNA, 1926 bp, Artificial Sequence
  pMT/STF2.4XM2e (H1)
atgaagttatgcatattactggccgtcgtggcctttgttggcctctcgctcgggagatctgcacaagtaatcaacactaacagtctgtcgctgctgacccagaataacctgaacaaatcccagtccgcactgggcaccgctatcgagcgtctgtcttctggtctgcgtatcaacagcgcgaaagacgatgcggcaggtcaggcgattgctaaccgtttcaccgcgaacatcaaaggtctgactcaggcttcccgtaacgctaacgacggtatctccattgcgcagaccactgaaggcgcgctgaacgaaatcaacaacaacctgcagcgtgtgcgtgaactggcggttcagtctgctaacagcaccaactcccagtctgacctcgactccatccaggctgaaatcacccagcgcctgaacgaaatcgaccgtgtatccggccagactcagttcaacggcgtgaaagtcctggcgcaggacaacaccctgaccatccaggttggcgccaacgacggtgaaactatcgatatcgatctgaagcagatcaactctcagaccctgggtctggactcactgaacgtgcagaaagcgtatgatgtgaaagatacagcagtaacaacgaaagcttatgccaataatggtactacactggatgtatcgggtcttgatgatgcagctattaaagcggctacgggtggtacgaatggtacggcttctgtaaccggtggtgcggttaaatttgacgcagataataacaagtactttgttactattggtggctttactggtgctgatgccgccaaaaatggcgattatgaagttaacgttgctactgacggtacagtaacccttgcggctggcgcaactaaaaccacaatgcctgctggtgcgacaactaaaacagaagtacaggagttaaaagatacaccggcagttgtttcagcagatgctaaaaatgccttaattgctggcggcgttgacgctaccgatgctaatggcgctgagttggtcaaaatgtcttataccgataaaaatggtaagacaattgaaggcggttatgcgcttaaagctggcgataagtattacgccgcagattacgatgaagcgacaggagcaattaaagctaaaactacaagttatactgctgctgacggcactaccaaaacagcggctaaccaactgggtggcgtagacggtaaaaccgaagtcgttactatcgacggtaaaacctacaatgccagcaaagccgctggtcatgatttcaaagcacaaccagagctggcggaagcagccgctaaaaccaccgaaaacccgctgcagaaaattgatgccgcgctggcgcaggtggatgcgctgcgctctgatctgggtgcggtacaaaaccgtttcaactctgctatcaccaacctgggcaataccgtaaacaatctgtctgaagcgcgtagccgtatcgaagattccgactacgcgaccgaagtttccaacatgtctcgcgcgcagattctgcagcaggccggtacttccgttctggcgcaggctaaccaggtcccgcagaacgtgctgtctctgttacgtaagggcaattcgaagcttgaaggtcaattggaattcagcttgctgactgaggttgagaccccgattcgcaacgaatggggttcccgttccaacgattcttccgacccgctcgagagcctgttgaccgaggttgaaacccctatccgtaatgaatggggctcccgtagcaacgactcttctgacccaggatcctccctcttgaccgaagtggaaacgcctattcgtaatgagtggggttctcgtagcaatgacagctcggacccggagctctcgctgctgacggaagtggagactccgatccgtaacgagtggggctctcgctctaacgatagctcagacccgtctagataa

SEQ ID NO: 580 - protein, 641 aa, Artificial Sequence
  pMT/STF2.4XM2e (H5)
MKLCILLAVVAFVGLSLGRSAQVINTNSLSLLTQNNLNKSQSALGTAIERLSSGLRINSAKDDAAGQAIANRFTANIKGLTQASRNANDGISIAQTTEGALNEINNNLQRVRELAVQSANSTNSQSDLDSIQAEITQRLNEIDRVSGQTQFNGVKVLAQDNTLTIQVGANDGETIDIDLKQINSQTLGLDSLNVQKAYDVKDTAVTTKAYANNGTTLDVSGLDDAAIKAATGGTNGTASVTGGAVKFDADNNKYFVTIGGFTGADAAKNGDYEVNVATDGTVTLAAGATKTTMPAGATTKTEVQELKDTPAVVSADAKNALIAGGVDATDANGAELVKMSYTDKNGKTIEGGYALKAGDKYYAADYDEATGAIKAKTTSYTAADGTTKTAANQLGGVDGKTEVVTIDGKTYNASKAAGHDFKAQPELAEAAAKTTENPLQKIDAALAQVDALRSDLGAVQNRFNSAITNLGNTVNNLSEARSRIEDSDYATEVSNMSRAQILQQAGTSVLAQANQVPQNVLSLLRKGNSKLEGQLEFSLLTEVETPTRNEWESRSSDSSDPLESLLTEVETPTRNEWESRSSDSSDPESSLLTEVETPTRNEWESRSSDSSDPGSSLLTEVETPTRNEWESRSSDSSDPSR

SEQ ID NO: 581 - DNA, 1927 bp, Artificial Sequence
  pMT/STF2.4XM2e (H5)
atgaagttatgcatattactggccgtcgtggcctttgttggcctctcgctcgggagatctgcacaagtaatcaacactaacagtctgtcgctgctgacccagaataacctgaacaaatcccagtccgcactgggcaccgctatcgagcgtctgtcttctggtctgcgtatcaacagcgcgaaagacgatgcggcaggtcaggcgattgctaaccgtttcaccgcgaacatcaaaggtctgactcaggcttcccgtaacgctaacgacggtatctccattgcgcagaccactgaaggcgcgctgaacgaaatcaacaacaacctgcagcgtgtgcgtgaactggcggttcagtctgctaacagcaccaactcccagtctgacctcgactccatccaggctgaaatcacccagcgcctgaacgaaatcgaccgtgtatccggccagactcagttcaacggcgtgaaagtcctggcgcaggacaacaccctgaccatccaggttggcgccaacgacggtgaaactatcgatatcgatctgaagcagatcaactctcagaccctgggtctggactcactgaacgtgcagaaagcgtatgatgtgaaagatacagcagtaacaacgaaagcttatgccaataatggtactacactggatgtatcgggtcttgatgatgcagctattaaagcggctacgggtggtacgaatggtacggcttctgtaaccggtggtgcggttaaatttgacgcagataataacaagtactttgttactattggtggctttactggtgctgatgccgccaaaaatggcgattatgaagttaacgttgctactgacggtacagtaacccttgcggctggcgcaactaaaaccacaatgcctgctggtgcgacaactaaaacagaagtacaggagttaaaagatacaccggcagttgtttcagcagatgctaaaaatgccttaattgctggcggcgttgacgctaccgatgctaatggcgctgagttggtcaaaatgtcttataccgataaaaatggtaagacaattgaaggcggttatgcgcttaaagctggcgataagtattacgccgcagattacgatgaagcgacaggagcaattaaagctaaaactacaagttatactgctgctgacggcactaccaaaacagcggctaaccaactgggtggcgtagacggtaaaaccgaagtcgttactatcgacggtaaaacctacaatgccagcaaagccgctggtcatgatttcaaagcacaaccagagctggcggaagcagccgctaaaaccaccgaaaacccgctgcagaaaattgatgccgcgctggcgcaggtggatgcgctgcgctctgatctgggtgcggtacaaaaccgtttcaactctgctatcaccaacctgggcaataccgtaaacaatctgtctgaagcgcgtagccgtatcgaagattccgactacgcgaccgaagtttccaacatgtctcgcgcgcagattctgcagcaggccggtacttccgttctggcgcaggctaaccaggtcccgcagaacgtgctgtctctgttacgtaagggcaattcgaagcttgaaggtcaattggaattctctctgctgactgaagtagaaactccaacgcgtaatgaatgggaatcccgttctagcgactcctctgatcctctcgagtccctgctgacggaggttgaaaccccgacccgcaacgagtgggaaagccgttcctccgattcctctgatccggagagcagcctgctgaccgaggtagaaaccccgacccgtaatgagtgggaatctcgctcctctgattcttctgacccgggatcctctctgctgaccgaagtggagactccgactcgcaacgaatgggagagccgttcttctgactcctctgacccgtctagataat

SEQ ID NO: 582 - protein, 749 aa, Artificial Sequence
  pMT/STF2.4XM2e (H1 H5)
MKLCILLAVVAFVGLSLGRSAQVINTNSLSLLTQNNLNKSQSALGTAIERLSSGLRINSAKDDAAGQAIANRFTANIKGLTQASRNANDGISIAQTTEGALNEINNNLQRVRELAVQSANSTNSQSDLDSIQAEITQRLNEIDRVSGQTQFNGVKVLAQDNTLTIQVGANDGETIDIDLKQINSQTLGLDSLNVQKAYDVKDTAVTTKAYANNGTTLDVSGLDDAAIKAATGGTNGTASVTGGAVKFDADNNKYFVTIGGFTGADAAKNGDYEVNVATDGTVTLAAGATKTTMPAGATTKTEVQELKDTPAVVSADAKNALIAGGVDATDANGAELVKMSYTDKNGKTIEGGYALKAGDKYYAADYDEATGAIKAKTTSYTAADGTTKTAANQLGGVDGKTEVVTIDGKTYNASKAAGHDFKAQPELAEAAAKTTENPLQKIDAALAQVDALRSDLGAVQNRFNSAITNLGNTVNNLSEARSRIEDSDYATEVSNMSRAQILQQAGTSVLAQANQVPQNVLSLLRKGNSKLEGQLEFSLLTEVETPIRNEWGSRSNDSSDPLESLLTEVETPIRNEWGSRSNDSSDPGSSLLTEVETPIRNEWGSRSNDSSDPELSLLTEVETPIRNEWGSRSNDSSDPSRSREFSLLTEVETPTRNEWESRSSDSSDPLESLLTEVETPTRNEWESRSSDSSDPESSLLTEVETPTRNEWESRSSDSSDPGSSLLTEVETPTRNEWESRSSDSSDPSR

SEQ ID NO: 583 - DNA, 2250 bp, Artificial Sequence
  pMT/STF2.4XM2e (H1 H5)
atgaagttatgcatattactggccgtcgtggcctttgttggcctctcgctcgggagatctgcacaagtaatcaacactaacagtctgtcgctgctgacccagaataacctgaacaaatcccagtccgcactgggcaccgctatcgagcgtctgtcttctggtctgcgtatcaacagcgcgaaagacgatgcggcaggtcaggcgattgctaaccgtttcaccgcgaacatcaaaggtctgactcaggcttcccgtaacgctaacgacggtatctccattgcgcagaccactgaaggcgcgctgaacgaaatcaacaacaacctgcagcgtgtgcgtgaactggcggttcagtctgctaacagcaccaactcccagtctgacctcgactccatccaggctgaaatcacccagcgcctgaacgaaatcgaccgtgtatccggccagactcagttcaacggcgtgaaagtcctggcgcaggacaacaccctgaccatccaggttggcgccaacgacggtgaaactatcgatatcgatctgaagcagatcaactctcagaccctgggtctggactcactgaacgtgcagaaagcgtatgatgtgaaagatacagcagtaacaacgaaagcttatgccaataatggtactacactggatgtatcgggtcttgatgatgcagctattaaagcggctacgggtggtacgaatggtacggcttctgtaaccggtggtgcggttaaatttgacgcagataataacaagtactttgttactattggtggctttactggtgctgatgccgccaaaaatggcgattatgaagttaacgttgctactgacggtacagtaacccttgcggctggcgcaactaaaaccacaatgcctgctggtgcgacaactaaaacagaagtacaggagttaaaagatacaccggcagttgtttcagcagatgctaaaaatgccttaattgctggcggcgttgacgctaccgatgctaatggcgctgagttggtcaaaatgtcttataccgataaaaatggtaagacaattgaaggcggttatgcgcttaaagctggcgataagtattacgccgcagattacgatgaagcgacaggagcaattaaagctaaaactacaagttatactgctgctgacggcactaccaaaacagcggctaaccaactgggtggcgtagacggtaaaaccgaagtcgttactatcgacggtaaaacctacaatgccagcaaagccgctggtcatgatttcaaagcacaaccagagctggcggaagcagccgctaaaaccaccgaaaacccgctgcagaaaattgatgccgcgctggcgcaggtggatgcgctgcgctctgatctgggtgcggtacaaaaccgtttcaactctgctatcaccaacctgggcaataccgtaaacaatctgtctgaagcgcgtagccgtatcgaagattccgactacgcgaccgaagtttccaacatgtctcgcgcgcagattctgcagcaggccggtacttccgttctggcgcaggctaaccaggtcccgcagaacgtgctgtctctgttacgtaagggcaattcgaagcttgaaggtcaattggaattcagcttgctgactgaggttgagaccccgattcgcaacgaatggggttcccgttccaacgattcttccgacccgctcgagagcctgttgaccgaggttgaaacccctatccgtaatgaatggggctcccgtagcaacgactcttctgacccaggatcctccctcttgaccgaagtggaaacgcctattcgtaatgagtggggttctcgtagcaatgacagctcggacccggagctctcgctgctgacggaagtggagactccgatccgtaacgagtggggctctcgctctaacgatagctcagacccgtctagatctagagaattctctctgctgactgaagtagaaactccaacgcgtaatgaatgggaatcccgttctagcgactcctctgatcctctcgagtccctgctgacggaggttgaaaccccgacccgcaacgagtgggaaagccgttcctccgattcctctgatccggagagcagcctgctgaccgaggtagaaaccccgacccgtaatgagtgggaatctcgctcctctgattcttctgacccgggatcctctctgctgaccgaagtggagactccgactcgcaacgaatgggagagccgttcttctgactcctctgacccgtctagataa

SEQ ID NO: 584 - protein, 318 aa, Artificial Sequence
  pMT/STF2delta
MKLCILLAVVAFVGLSLGRSAQVINTNSLSLLTQNNLNKSQSALGTAIERLSSGLRINSAKDDAAGQAIANRFTANIKGLTQASRNANDGISIAQTTEGALNEINNNLQRVRELAVQSANSTNSQSDLDSIQAEITQRLNEIDRVSGQTQFNGVKVLAQDNTLTIQVGANDGETIDIDLKQINSQTLGLDSLNVHGAPVDPASPWTENPLQKIDAALAQVDALRSDLGAVQNRFNSAITNLGNTVNNLSEARSRIEDSDYATEVSNMSRAQILQQAGTSVLAQANQVPQNVLSLLREFSRYPAQWRPLTRTGHHHHHH

SEQ ID NO: 585 - DNA, 957 bp, Artificial Sequence
  pMT/STF2delta
atgaagttatgcatattactggccgtcgtggcctttgttggcctctcgctcgggagatctgcacaagtaatcaacactaacagtctgtcgctgctgacccagaataacctgaacaaatcccagtccgcactgggcaccgctatcgagcgtctgtcttctggtctgcgtatcaacagcgcgaaagacgatgcggcaggtcaggcgattgctaaccgtttcaccgcgaacatcaaaggtctgactcaggcttcccgtaacgctaacgacggtatctccattgcgcagaccactgaaggcgcgctgaacgaaatcaacaacaacctgcagcgtgtgcgtgaactggcggttcagtctgctaacagcaccaactcccagtctgacctcgactccatccaggctgaaatcacccagcgcctgaacgaaatcgaccgtgtatccggccagactcagttcaacggcgtgaaagtcctggcgcaggacaacaccctgaccatccaggttggcgccaacgacggtgaaactatcgatatcgatctgaagcagatcaactctcagaccctgggtctggactcactgaacgtgcatggagcgccggtggatcctgctagcccatggaccgaaaacccgctgcagaaaattgatgccgcgctggcgcaggtggatgcgctgcgctctgatctgggtgcggtacaaaaccgtttcaactctgctatcaccaacctgggcaataccgtaaacaatctgtctgaagcgcgtagccgtatcgaagattccgactacgcgaccgaagtttccaacatgtctcgcgcgcagattttgcagcaggccggtacttccgttctggcgcaggctaaccaggtcccgcagaacgtgctgtctctgttacgtgaattctctagatatccagcacagtggcggccgctcacgcgtaccggtcatcatcaccatcaccattga

SEQ ID NO: 586 - protein, 402 aa, Artificial Sequence
  pMT/STF2delta.4XM2e (H1)
MKLCILLAVVAFVGLSLGRSAQVINTNSLSLLTQNNLNKSQSALGTAIERLSSGLRINSAKDDAAGQAIANRFTANIKGLTQASRNANDGISIAQTTEGALNEINNNLQRVRELAVQSANSTNSQSDLDSIQAEITQRLNEIDRVSGQTQFNGVKVLAQDNTLTIQVGANDGETIDIDLKQINSQTLGLDSLNVHGAPVDPASPWTENPLQKIDAALAQVDALRSDLGAVQNRFNSAITNLGNTVNNLSEARSRIEDSDYATEVSNMSRAQILQQAGTSVLAQANQVPQNVLSLLREFSLLTEVETPIRNEWGSRSNDSSDPLESLLTEVETPIRNEWGSRSNDSSDPGSSLLTEVETPIRNEWGSRSNDSSDPELSLLTEVETPIRNEWGSRSNDSSDPSR

SEQ ID NO: 587 - DNA, 1203 bp, Artificial Sequence
  pMT/STF2delta.4XM2e (H1)
atgtgcatattactggccgtcgtggcctttgttggcctctcgctcgggagatctgcacaagtaatcaacactaacagtctgtcgctgctgacccagaataacctgaacaaatcccagtccgcactgggcaccgctatcgagcgtctgtcttctggtctgcgtatcaacagcgcgaaagacgatgcggcaggtcaggcgattgctaaccgtttcaccgcgaacatcaaaggtctgactcaggcttcccgtaacgctaacgacggtatctccattgcgcagaccactgaaggcgcgctgaacgaaatcaacaacaacctgcagcgtgtgcgtgaactggcggttcagtctgctaacagcaccaactcccagtctgacctcgactccatccaggctgaaatcacccagcgcctgaacgaaatcgaccgtgtatccggccagactcagttcaacggcgtgaaagtcctggcgcaggacaacaccctgaccatccaggttggcgccaacgacggtgaaactatcgatatcgatctgaagcagatcaactctcagaccctgggtctggactcactgaacgtgcatggagcgccggtggatcctgctagcccatggaccgaaaacccgctgcagaaaattgatgccgcgctggcgcaggtggatgcgctgcgctctgatctgggtgcggtacaaaaccgtttcaactctgctatcaccaacctgggcaataccgtaaacaatctgtctgaagcgcgtagccgtatcgaagattccgactacgcgaccgaagtttccaacatgtctcgcgcgcagattttgcagcaggccggtacttccgttctggcgcaggctaaccaggtcccgcagaacgtgctgtctctgttacgtgaattcagcttgctgactgaggttgagaccccgattcgcaacgaatggggttcccgttccaacgattcttccgacccgctcgagagcctgttgaccgaggttgaaacccctatccgtaatgaatggggctcccgtagcaacgactcttctgacccaggatcctccctcttgaccgaagtggaaacgcctattcgtaatgagtggggttctcgtagcaatgacagctcggacccggagctctcgctgctgacggaagtggagactccgatccgtaacgagtggggctctcgctctaacgatagctcagacccgtctagataa

SEQ ID NO: 588 - protein, 402 aa, Artificial Sequence
  pMT/STF2delta.4XM2e (H5)
MKLCILLAVVAFVGLSLGRSAQVINTNSLSLLTQNNLNKSQSALGTAIERLSSGLRINSAKDDAAGQAIANRFTANIKGLTQASRNANDGISIAQTTEGALNEINNNLQRVRELAVQSANSTNSQSDLDSIQAEITQRLNEIDRVSGQTQFNGVKVLAQDNTLTIQVGANDGETIDIDLKQINSQTLGLDSLNVHGAPVDPASPWTENPLQKIDAALAQVDALRSDLGAVQNRFNSAITNLGNTVNNLSEARSRIEDSDYATEVSNMSRAQILQQAGTSVLAQANQVPQNVLSLLREFSLLTEVETPTRNEWESRSSDSSDPLESLLTEVETPTRNEWESRSSDSSDPESSLLTEVETPTRNEWESRSSDSSDPGSSLLTEVETPTRNEWESRSSDSSDPSR

SEQ ID NO: 589 - DNA, 1206 bp, Artificial Sequence
  pMT/STF2delta.4XM2e (H5)
atgtgcatattactggccgtcgtggcctttgttggcctctcgctcgggagatctgcacaagtaatcaacactaacagtctgtcgctgctgacccagaataacctgaacaaatcccagtccgcactgggcaccgctatcgagcgtctgtcttctggtctgcgtatcaacagcgcgaaagacgatgcggcaggtcaggcgattgctaaccgtttcaccgcgaacatcaaaggtctgactcaggcttcccgtaacgctaacgacggtatctccattgcgcagaccactgaaggcgcgctgaacgaaatcaacaacaacctgcagcgtgtgcgtgaactggcggttcagtctgctaacagcaccaactcccagtctgacctcgactccatccaggctgaaatcacccagcgcctgaacgaaatcgaccgtgtatccggccagactcagttcaacggcgtgaaagtcctggcgcaggacaacaccctgaccatccaggttggcgccaacgacggtgaaactatcgatatcgatctgaagcagatcaactctcagaccctgggtctggactcactgaacgtgcatggagcgccggtggatcctgctagcccatggaccgaaaacccgctgcagaaaattgatgccgcgctggcgcaggtggatgcgctgcgctctgatctgggtgcggtacaaaaccgtttcaactctgctatcaccaacctgggcaataccgtaaacaatctgtctgaagcgcgtagccgtatcgaagattccgactacgcgaccgaagtttccaacatgtctcgcgcgcagattttgcagcaggccggtacttccgttctggcgcaggctaaccaggtcccgcagaacgtgctgtctctgttacgtgaattctctctgctgactgaagtagaaactccaacgcgtaatgaatgggaatcccgttctagcgactcctctgatcctctcgagtccctgctgacggaggttgaaaccccgacccgcaacgagtgggaaagccgttcctccgattcctctgatccggagagcagcctgctgaccgaggtagaaaccccgacccgtaatgagtgggaatctcgctcctctgattcttctgacccgggatcctctctgctgaccgaagtggagactccgactcgcaacgaatgggagagccgttcttctgactcctctgacccgtctagataataa

SEQ ID NO: 590 - protein, 508 aa, Artificial Sequence
  pMT/STF2delta.4XM2e (H1H5)
MKLCILLAVVAFVGLSLGRSAQVINTNSLSLLTQNNLNKSQSALGTAIERLSSGLRINSAKDDAAGQAIANRFTANIKGLTQASRNANDGISIAQTTEGALNEINNNLQRVRELAVQSANSTNSQSDLDSIQAEITQRLNEIDRVSGQTQFNGVKVLAQDNTLTIQVGANDGETIDIDLKQINSQTLGLDSLNVHGAPVDPASPWTENPLQKIDAALAQVDALRSDLGAVQNRFNSAITNLGNTVNNLSEARSRIEDSDYATEVSNMSRAQILQQAGTSVLAQANQVPQNVLSLLREFSLLTEVETPIRNEWGSRSNDSSDPLESLLTEVETPIRNEWGSRSNDSSDPGSSLLTEVETPIRNEWGSRSNDSSDPELSLLTEVETPIRNEWGSRSNDSSDPSRQFSLLTEVETPTRNEWESRSSDSSDPLESLLTEVETPTRNEWESRSSDSSDPESSLLTEVETPTRNEWESRSSDSSDPGSSLLTEVETPTRNEWESRSSDSSDPSR

SEQ ID NO: 591 - DNA, 1527 bp, Artificial Sequence
  pMT/STF2delta.4XM2e (H1H5)
atgtgcatattactggccgtcgtggcctttgttggcctctcgctcgggagatctgcacaagtaatcaacactaacagtctgtcgctgctgacccagaataacctgaacaaatcccagtccgcactgggcaccgctatcgagcgtctgtcttctggtctgcgtatcaacagcgcgaaagacgatgcggcaggtcaggcgattgctaaccgtttcaccgcgaacatcaaaggtctgactcaggcttcccgtaacgctaacgacggtatctccattgcgcagaccactgaaggcgcgctgaacgaaatcaacaacaacctgcagcgtgtgcgtgaactggcggttcagtctgctaacagcaccaactcccagtctgacctcgactccatccaggctgaaatcacccagcgcctgaacgaaatcgaccgtgtatccggccagactcagttcaacggcgtgaaagtcctggcgcaggacaacaccctgaccatccaggttggcgccaacgacggtgaaactatcgatatcgatctgaagcagatcaactctcagaccctgggtctggactcactgaacgtgcatggagcgccggtggatcctgctagcccatggaccgaaaacccgctgcagaaaattgatgccgcgctggcgcaggtggatgcgctgcgctctgatctgggtgcggtacaaaaccgtttcaactctgctatcaccaacctgggcaataccgtaaacaatctgtctgaagcgcgtagccgtatcgaagattccgactacgcgaccgaagtttccaacatgtctcgcgcgcagattttgcagcaggccggtacttccgttctggcgcaggctaaccaggtcccgcagaacgtgctgtctctgttacgtgaattcagcttgctgactgaggttgagaccccgattcgcaacgaatggggttcccgttccaacgattcttccgacccgctcgagagcctgttgaccgaggttgaaacccctatccgtaatgaatggggctcccgtagcaacgactcttctgacccaggatcctccctcttgaccgaagtggaaacgcctattcgtaatgagtggggttctcgtagcaatgacagctcggacccggagctctcgctgctgacggaagtggagactccgatccgtaacgagtggggctctcgctctaacgatagctcagacccgtctagatctagagaattctctctgctgactgaagtagaaactccaacgcgtaatgaatgggaatcccgttctagcgactcctctgatcctctcgagtccctgctgacggaggttgaaaccccgacccgcaacgagtgggaaagccgttcctccgattcctctgatccggagagcagcctgctgaccgaggtagaaaccccgacccgtaatgagtgggaatctcgctcctctgattcttctgacccgggatcctctctgctgaccgaagtggagactccgactcgcaacgaatgggagagccgttcttctgactcctctgacccgtctagataa

SEQ ID NO: 592 - DNA, 33 bp, Artificial Sequence
  M2
gaggttgagaccccgattcgcaacgaatggggt

SEQ ID NO: 593 - protein, 10 aa, Artificial Sequence
  Linker
GAPVDPASPW

SEQ ID NO: 594 - protein, 277 aa, Artificial Sequence
  S. muenchen
MAQVINTNSLSLLTQNNLNKSQSALGTAIERLSSGLRINSAKDDAAGQAIANRFTANIKGLTQASRNANDGISIAQTTEGALNEINNNLQRVRELAVQSANGTNSQSDLDSIQAEITQRLNEIDRVSGQTQFNGVKVLAQDNTLTIQVGANDGETIDIDLKEISSKTLDKHNFRTGGELKEVNTDKTENPLQKIDAALAQVDTLRSDLGAVQNRFNSAITNLGNTVNNLSSARSRIEDSDYATEVSNMSRAQILQQAGTSVLAQANQVPQNVLSLLR

SEQ ID NO: 595 - DNA, 789 bp, Artificial Sequence
  S. muenchen
atggcacaagtcattaatacaaacagcctgtcgctgttgacccagaataacctgaacaaatcccagtccgctctgggcaccgctatcgagcgtctgtcttccggtctgcgtatcaacagcgcgaaagacgatgcggcaggtcaggcgattgctaaccgtttcaccgcgaacatcaaaggtctgactcaggcttcccgtaacgctaacgacggtatctccattgcgcagaccactgaaggcgcgctgaacgaaatcaacaacaacctgcagcgtgtgcgtgaactggcggttcagtctgctaacggtactaactcccagtctgaccttgactctatccaggctgaaatcacccagcgtctgaacgaaatcgaccgtgtatccggtcagactcagttcaacggcgtgaaagtcctggcgcaggacaacaccctgaccatccaggttggtgccaacgacggtgaaactattgatattgatttaaaagaaattagctctaaaacactgacagataagactgaaaacccactgcagaaaattgatgctgccttggcacaggttgatacacttcgttctgacctgggtgcggtacagaaccgtttcaactccgctatcaccaacctgggcaataccgtaaataacctgtcttctgcccgtagccgtatcgaagattccgactacgcgaccgaagtctccaacatgtctcgcgcgcagattctgcagcaggccggtacctccgttctggcgcaggctaaccaggttccgcaaaacgtcctctctttactgcgttaa

SEQ ID NO: 596 - protein, 102 aa, Artificial Sequence
  H1 and H5
SLLTEVETPTRNEWESRSSDSSDPLESLLTEVETPTRNEWESRSSDSSDPESSLLTEVETPTRNEWESRSSDSSDPGSSLLTEVETPTRNEWESRSSDSSDP

SEQ ID NO: 597 - DNA, 306 bp, Artificial Sequence
  H1 and H5
tctctgctgactgaagtagaaactccaacgcgtaatgaatgggaatcccgttctagcgactcctctgatcctctcgagtccctgctgacggaggttgaaaccccgacccgcaacgagtgggaaagccgttcctccgattcctctgatccggagagcagcctgctgaccgaggtagaaaccccgacccgtaatgagtgggaatctcgctcctctgattcttctgacccgggatcctctctgctgaccgaagtggagactccgactcgcaacgaatgggagagccgttcttctgactcctctgacccg

SEQ ID NO: 598 - protein, 20 aa, Artificial Sequence
  HA
PAKLLKERGFFGAIAGFLEE

SEQ ID NO: 599 - protein, 20 aa, Artificial Sequence
  HA
NIPSIQSRGLFGAIAGFIEE

SEQ ID NO: 600 - protein, 20 aa, Artificial Sequence
  HA
NVPEKQTRGIFGAIAGFIEE

SEQ ID NO: 601 - protein, 20 aa, Artificial Sequence
  HA
RERRRKKRGLFGAIAGFIEE

SEQ ID NO: 602 - DNA, 72 bp, Artificial Sequence
  M2
agcttgctgactgaggttgagaccccgattcgcaacgaatggggttcccgttccaacgattcttccgacccg

SEQ ID NO: 603 - DNA, 1517 bp, S. typhimurium
tggcacaagtaatcaacactaacagtctgtcgctgctgacccagaataacctgaacaaatcccagtccgcactgggcaccgctatcgagcgtctgtcttctggtctgcgtatcaacagcgcgaaagacgatgcggcaggtcaggcgattgctaaccgtttcaccgcgaacatcaaaggtctgactcaggcttcccgtaacgctaacgacggtatctccattgcgcagaccactgaaggcgcgctgaacgaaatcaacaacaacctgcagcgtgtgcgtgaactggcggttcagtctgctaacagcaccaactcccagtctgacctcgactccatccaggctgaaatcacccagcgcctgaacgaaatcgaccgtgtatccggccagactcagttcaacggcgtgaaagtcctggcgcaggacaacaccctgaccatccaggttggcgccaacgacggtgaaactatcgatatcgatctgaagcagatcaactctcagaccctgggtctggactcactgaacgtgcagaaagcgtatgatgtgaaagatacagcagtaacaacgaaagcttatgccaataatggtactacactggatgtatcgggtcttgatgatgcagctattaaagcggctacgggtggtacgaatggtacggcttctgtaaccggtggtgcggttaaatttgacgcagataataacaagtactttgttactattggtggctttactggtgctgatgccgccaaaaatggcgattatgaagttaacgttgctactgacggtacagtaacccttgcggctggcgcaactaaaaccacaatgcctgctggtgcgacaactaaaacagaagtacaggagttaaaagatacaccggcagttgtttcagcagatgctaaaaatgccttaattgctggcggcgttgacgctaccgatgctaatggcgctgagttggtcaaaatgtcttataccgataaaaatggtaagacaattgaaggcggttatgcgcttaaagctggcgataagtattacgccgcagattacgatgaagcgacaggagcaattaaagctaaaactacaagttatactgctgctgacggcactaccaaaacagcggctaaccaactgggtggcgtagacggtaaaaccgaagtcgttactatcgacggtaaaacctacaatgccagcaaagccgctggtcatgatttcaaagcacaaccagagctggcggaagcagccgctaaaaccaccgaaaacccgctgcagaaaattgatgccgcgctggcgcaggtggatgcgctgcgctctgatctgggtgcggtacaaaaccgtttcaactctgctatcaccaacctgggcaataccgtaaacaatctgtctgaagcgcgtagccgtatcgaagattccgactacgcgaccgaagtttccaacatgtctcgcgcgcagattctgcagcaggccggtacttccgttctggcgcaggctaaccaggtcccgcagaacgtgctgtctctgttacgt

SEQ ID NO: 604 - protein, 277 aa, S. typhimurium; identical to SEQ ID NO: 313

SEQ ID NO: 605 - DNA, 832 bp, S. typhimurium; identical to SEQ ID NO: 500

SEQ ID NO: 606 - DNA, 1215 bp, Artificial Sequence
  pET/STF2delta.JEIII+
atggcacaagtaatcaacactaacagtctgtcgctgctgacccagaataacctgaacaaatcccagtccgcactgggcaccgctatcgagcgtctgtcttctggtctgcgtatcaacagcgcgaaagacgatgcggcaggtcaggcgattgctaaccgtttcaccgcgaacatcaaaggtctgactcaggcttcccgtaacgctaacgacggtatctccattgcgcagaccactgaaggcgcgctgaacgaaatcaacaacaacctgcagcgtgtgcgtgaactggcggttcagtctgctaacagcaccaactcccagtctgacctcgactccatccaggctgaaatcacccagcgcctgaacgaaatcgaccgtgtatccggccagactcagttcaacggcgtgaaagtcctggcgcaggacaacaccctgaccatccaggttggcgccaacgacggtgaaactatcgatatcgatctgaagcagatcaactctcagaccctgggtctggactcactgaacgtgcatggagcgccggtggatcctgctagcccatggaccgaaaacccgctgcagaaaattgatgccgcgctggcgcaggtggatgcgctgcgctctgatctgggtgcggtacaaaaccgtttcaactctgctatcaccaacctgggcaataccgtaaacaatctgtctgaagcgcgtagccgtatcgaagattccgactacgcgaccgaagtttccaacatgtctcgcgcgcagattttgcagcaggccggtacttccgttctggcgcaggctaaccaggtcccgcagaacgtgctgtctctgttacgtgaattctgcagatatccagcacagtggcggccgctcatggacaaactggctctgaaaggcacaacctatggcatgtgtacagaaaaattctcgttcgcgaaaaatccggtggacactggtcacggaacagttgtcattgaactctcctactctgggagtgatggcccctgcaaaattccgattgtttccgttgcgagcctcaatgacatgacccccgttgggcggctggtgacagtgaaccccttcgtcgcgacttccagtgccaactcaaaggtgctggtcgagatggaaccccccttcggagactcctacatcgtagttggaaggggagacaagcagatcaaccaccattggcacaaagctggaagcacgctgggcaaggcc

SEQ ID NO: 607 - protein, 405 aa, Artificial Sequence
  pET/STF2delta.JEIII+
MAQVINTNSLSLLTQNNLNKSQSALGTAIERLSSGLRINSAKDDAAGQAIANRFTANIKGLTQASRNANDGISIAQTTEGALNEINNNLQRVRELAVQSANSTNSQSDLDSIQAEITQRLNEIDRVSGQTQFNGVKVLAQDNTLTIQVGANDGETIDIDLKQINSQTLGLDSLNVHGAPVDPASPWTENPLQKIDAALAQVDALRSDLGAVQNRFNSAITNLGNTVNNLSEARSRIEDSDYATEVSNMSRAQILQQAGTSVLAQANQVPQNVLSLLREFCRYPAQWRPLMDKLALKGTTYGMCTEKFSFAKNPVDTGHGTVVIELSYSGSDGPCKIPIVSVASLNDMTPVGRLVTVNPFVATSSANSKVLVEMEPPFGDSYIVVGRGDKQINHHWHKAGSTLGKA

SEQ ID NO: 608 - protein, 115 aa, Artificial Sequence
  West Nile domain III
MEKLQLKGTTYGVCSKAFKFLGTPADTGHGTVVLELQYTGTDGPCKVPISSVASLNDLTPVGRLVTVNPFVSVATANAKVLIELEPPFGDSYIVVGRGEQQINHHWHKSGSSIGK

SEQ ID NO: 609 - protein, 103 aa, Artificial Sequence
  West Nile domain III
GTTYGVCSKAFKFARTPADTGHGTVVLELQYTGKDGPCKVPISSVASLNDLTPVGRLVTVNPFVSVATANSKVLIELEPPFGDSYIVVGRGEQQINHHWHKSG

SEQ ID NO: 610 - protein, 102 aa, Artificial Sequence
  West Nile domain III
GTTYGVCSKAFKFLGTPADTGHGTVVLELQYTGTDGPCKVPISSVASLNDLTPVGRLVTVNPFVSVATANAKVLIELEPPFGDSYVVGRGEQQINHHWHKSG

SEQ ID NO: 611 - protein, 27 aa, Artificial Sequence
  West Nile domain III
ELEPPFGDSYIVVGRGEQQINHHWHKS

SEQ ID NO: 612 - DNA, 345 bp, Artificial Sequence
  West Nile domain III
atggaaaaattgcagttgaagggaacaacctatggcgtctgttcaaaggctttcaagtttcttgggactcccgcagacacaggtcacggcactgtggtgttggaattgcagtacactggcacggatggaccttgcaaagttcctatctcgtcagtggcttcattgaacgacctaacgccagtgggcagattggtcactgtcaacccttttgtttcagtggccacggccaacgctaaggtcctgattgaattggaaccaccctttggagactcatacatagtggtgggcagaggagaacaacagatcaatcaccattggcacaagtctggaagcagcattggcaaa

SEQ ID NO: 613 - protein, 96 aa, Artificial Sequence
  Langat virus
GLTYTVCDKTKFTWKRAPTDSGHDTVVMEVGFSGTRPCRIPVRAVAHGVPEVNVAMLITPNPTMENNGGGFIEMQLPPGDNIIYVGDLNHQWFQKG

SEQ ID NO: 614 - protein, 103 aa, Artificial Sequence
  Kunjin virus
GTTYGVCSKAFRFLGTPADTGHGTVVLELQYTGTDGPCKIPISSVASLNDLTPVGRLVTVNPFVSVSTANAKVLIELEPPFGDSYIVVGRGEQQINHHWHKSG

SEQ ID NO: 615 - protein, 103 aa, Artificial Sequence
  Murray Valley virus
GTTYGMCTEKFTFSKNPADTGHGTVVLELQYTGSDGPCKIPISSVASLNDMTPVGRMVTANPYVASSTANAKVLVEIEPPFGDSYIVVGRGDKQINHHWHKEG

SEQ ID NO: 616 - protein, 103 aa, Artificial Sequence
  Japanese encephalitis virus
GTTYGMCTEKFSFAKNPADTGHGTVVIELSYSGSDGPCKIPIVSVASLNDMTPVGRLVTVNPFVATSSANSKVLVEMEPPFGSDYIVVGMGDKQINHHWHKAG

SEQ ID NO: 617 - protein, 26 aa, Artificial Sequence
  Japanese encephalitis virus
EMEPPFGDSYIVVMGDKQINHHWHKA

SEQ ID NO: 618 - protein, 95 aa, Artificial Sequence
  Tick-borne encephalitis virus
GLTYTMCDKTKFTWKRAPTDSGHDTVVMEVTFSGTKPCRIPVRAVAHGSPDVNVAMLITPNPTIENNGGGFIEMQLPPGDNIIYVGELSHQWFQK

SEQ ID NO: 619 - protein, 94 aa, Artificial Sequence
  Yellow fever virus
GLTYTMCDKTFTWKRAPTDSGHDTVVMEVTFSGTKPCRIPVRAVAHGSPDVNVAMLITPNPTIENNGGGFIEMQLPPGDNIIYVGELSHQWFQK

SEQ ID NO: 620 - protein, 95 aa, Artificial Sequence
  Envelope protein flavivirus
GTTYGMCSKKFTFRPADTGHGTVVLELQYSGDGPCKIPISVASKNDLTPVGRLVTVNPFVSSTANAKVLIEMEPPFGDSYIVVGGEQINHHWHKG

SEQ ID NO: 621 - protein, 27 aa, Artificial Sequence
  Dengue virus
EAEPPFGESYIVVGAGEKALKLSWFKK

SEQ ID NO: 622 - protein, 27 aa, Artificial Sequence
  Dengue virus
ETEPPFGESYIVVGAGEKALKLSWFKK

SEQ ID NO: 623 - protein, 27 aa, Artificial Sequence
  Dengue virus
EAEPPFGDSYIIIGVEPQQLKLNWFKK

SEQ ID NO: 624 - protein, 27 aa, Artificial Sequence
  Dengue virus
EAEPPFGESNIVIGIGDKALKINWYKK

SEQ ID NO: 625 - protein, 27 aa, Artificial Sequence
  Dengue virus
ELEPPFGESYIVIGVGNSALTLHWFRK

SEQ ID NO: 626 - DNA, 48 bp, Artificial Sequence; identical to SEQ ID NO: 519
  Linker

SEQ ID NO: 627 - protein, 16 aa, Artificial Sequence
  Linker
KGNSKLEGQLEFPRTS

SEQ ID NO: 628 - DNA, 36 bp, Artificial Sequence; identical to SEQ ID NO: 521
  Linker

SEQ ID NO: 629 - protein, 12 aa, Artificial Sequence
  Linker
EFCRYPAQWRPL

SEQ ID NO: 630 - DNA, 1863 bp, Artificial Sequence
  STF2.EIII+
atggcacaagtaatcaacactaacagtctgtcgctgctgacccagaataacctgaacaaatcccagtccgcactgggcaccgctatcgagcgtctgtcttctggtctgcgtatcaacagcgcgaaagacgatgcggcaggtcaggcgattgctaaccgtttcaccgcgaacatcaaaggtctgactcaggcttcccgtaacgctaacgacggtatctccattgcgcagaccactgaaggcgcgctgaacgaaatcaacaacaacctgcagcgtgtgcgtgaactggcggttcagtctgctaacagcaccaactcccagtctgacctcgactccatccaggctgaaatcacccagcgcctgaacgaaatcgaccgtgtatccggccagactcagttcaacggcgtgaaagtcctggcgcaggacaacaccctgaccatccaggttggcgccaacgacggtgaaactatcgatatcgatctgaagcagatcaactctcagaccctgggtctggactcactgaacgtgcagaaagcgtatgatgtgaaagatacagcagtaacaacgaaagcttatgccaataatggtactacactggatgtatcgggtcttgatgatgcagctattaaagcggctacgggtggtacgaatggtacggcttctgtaaccggtggtgcggttaaatttgacgcagataataacaagtactttgttactattggtggctttactggtgctgatgccgccaaaaatggcgattatgaagttaacgttgctactgacggtacagtaacccttgcggctggcgcaactaaaaccacaatgcctgctggtgcgacaactaaaacagaagtacaggagttaaaagatacaccggcagttgtttcagcagatgctaaaaatgccttaattgctggcggcgttgacgctaccgatgctaatggcgctgagttggtcaaaatgtcttataccgataaaaatggtaagacaattgaaggcggttatgcgcttaaagctggcgataagtattacgccgcagattacgatgaagcgacaggagcaattaaagctaaaactacaagttatactgctgctgacggcactaccaaaacagcggctaaccaactgggtggcgtagacggtaaaaccgaagtcgttactatcgacggtaaaacctacaatgccagcaaagccgctggtcatgatttcaaagcacaaccagagctggcggaagcagccgctaaaaccaccgaaaacccgctgcagaaaattgatgccgcgctggcgcaggtggatgcgctgcgctctgatctgggtgcggtacaaaaccgtttcaactctgctatcaccaacctgggcaataccgtaaacaatctgtctgaagcgcgtagccgtatcgaagattccgactacgcgaccgaagtttccaacatgtctcgcgcgcagattctgcagcaggccggtacttccgttctggcgcaggctaaccaggtcccgcagaacgtgctgtctctgttacgtatggaaaaattgcagttgaagggaacaacctatggcgtctgttcaaaggctttcaagtttcttgggactcccgcagacacaggtcacggcactgtggtgttggaattgcagtacactggcacggatggaccttgcaaagttcctatctcgtcagtggcttcattgaacgacctaacgccagtgggcagattggtcactgtcaacccttttgtttcagtggccacggccaacgctaaggtcctgattgaattggaaccaccctttggagactcatacatagtggtgggcagaggagaacaacagatcaatcaccattggcacaagtctggaagcagcattggcaaa

SEQ ID NO: 631 - protein, 621 aa, Artificial Sequence
  STF2.EIII+
MAQVINTNSLSLLTQNNLNKSQSALGTAIERLSSGLRINSAKDDAAGQAIANRFTANIKGLTQASRNANDGISIAQTTEGALNEINNNLQRVRELAVQSANSTNSQSDLDSIQAEITQRLNEIDRVSGQTQFNGVKVLAQDNTLTIQVGANDGETIDIDLKQINSQTLGLDSLNVQKAYDVKDTAVTTKAYANNGTTLDVSGLDDAAIKAATGGTNGTASVTGGAVKFDADNNKYFVTIGGFTGADAAKNGDYEVNVATDGTVTLAAGATKTTMPAGATTKTEVQELKDTPAVVSADAKNALIAGGVDATDANGAELVKMSYTDKNGKTIEGGYALKAGDKYYAADYDEATGAIKAKTTSYTAADGTTKTAANQLGGVDGKTEVVTIDGKTYNASKAAGHDFKAQPELAEAAAKTTENPLQKIDAALAQVDALRSDLGAVQNRFNSAITNLGNTVNNLSEARSRIEDSDYATEVSNMSRAQILQQAGTSVLAQANQVPQNVLSLLRMEKLQLKGTTYGVCSKAFKFLGTPADTGHGTVVLELQYTGTDGPCKVPISSVASLNDLTPVGRLVTVNPFVSVATANAKVLIELEPPFGDSYIVVGRGEQQINHHWHKSGSSIGK

SEQ ID NO: 632 - DNA, 1176 bp, Artificial Sequence
  STF2delta.EIII+
atggcacaagtaatcaacactaacagtctgtcgctgctgacccagaataacctgaacaaatcccagtccgcactgggcaccgctatcgagcgtctgtcttctggtctgcgtatcaacagcgcgaaagacgatgcggcaggtcaggcgattgctaaccgtttcaccgcgaacatcaaaggtctgactcaggcttcccgtaacgctaacgacggtatctccattgcgcagaccactgaaggcgcgctgaacgaaatcaacaacaacctgcagcgtgtgcgtgaactggcggttcagtctgctaacagcaccaactcccagtctgacctcgactccatccaggctgaaatcacccagcgcctgaacgaaatcgaccgtgtatccggccagactcagttcaacggcgtgaaagtcctggcgcaggacaacaccctgaccatccaggttggcgccaacgacggtgaaactatcgatatcgatctgaagcagatcaactctcagaccctgggtctggactcactgaacgtgcatggagcgccggtggatcctgctagcccatggaccgaaaacccgctgcagaaaattgatgccgcgctggcgcaggtggatgcgctgcgctctgatctgggtgcggtacaaaaccgtttcaactctgctatcaccaacctgggcaataccgtaaacaatctgtctgaagcgcgtagccgtatcgaagattccgactacgcgaccgaagtttccaacatgtctcgcgcgcagattttgcagcaggccggtacttccgttctggcgcaggctaaccaggtcccgcagaacgtgctgtctctgttacgtatggaaaaattgcagttgaagggaacaacctatggcgtctgttcaaaggctttcaagtttcttgggactcccgcagacacaggtcacggcactgtggtgttggaattgcagtacactggcacggatggaccttgcaaagttcctatctcgtcagtggcttcattgaacgacctaacgccagtgggcagattggtcactgtcaacccttttgtttcagtggccacggccaacgctaaggtcctgattgaattggaaccaccctttggagactcatacatagtggtgggcagaggagaacaacagatcaatcaccattggcacaagtctggaagcagcattggcaaa

SEQ ID NO: 633 - protein, 392 aa, Artificial Sequence
  STF2delta.EIII+
MAQVINTNSLSLLTQNNLNKSQSALGTAIERLSSGLRINSAKDDAAGQAIANRFTANIKGLTQASRNANDGISIAQTTEGALNEINNNLQRVRELAVQSANSTNSQSDLDSIQAEITQRLNEIDRVSGQTQFNGVKVLAQDNTLTIQVGANDGETIDIDLKQINSQTLGLDSLNVHGAPVDPASPWTENPLQKIDAALAQVDALRSDLGAVQNRFNSAITNLGNTVNNLSEARSRIEDSDYATEVSNMSRAQILQQAGTSVLAQANQVPQNVLSLLRMEKLQLKGTTYGVCSKAFKFLGTPADTGHGTVVLELQYTGTDGPCKVPISSVASLNDLTPVGRLVTVNPFVSVATANAKVLIELEPPFGDSYIVVGRGEQQINHHWHKSGSSIGK

SEQ ID NO: 634 - DNA, 1224 bp, Artificial Sequence
  STF2delta.EIII+
atggcacaagtaatcaacactaacagtctgtcgctgctgacccagaataacctgaacaaatcccagtccgcactgggcaccgctatcgagcgtctgtcttctggtctgcgtatcaacagcgcgaaagacgatgcggcaggtcaggcgattgctaaccgtttcaccgcgaacatcaaaggtctgactcaggcttcccgtaacgctaacgacggtatctccattgcgcagaccactgaaggcgcgctgaacgaaatcaacaacaacctgcagcgtgtgcgtgaactggcggttcagtctgctaacagcaccaactcccagtctgacctcgactccatccaggctgaaatcacccagcgcctgaacgaaatcgaccgtgtatccggccagactcagttcaacggcgtgaaagtcctggcgcaggacaacaccctgaccatccaggttggcgccaacgacggtgaaactatcgatatcgatctgaagcagatcaactctcagaccctgggtctggactcactgaacgtgcatggagcgccggtggatcctgctagcccatggaccgaaaacccgctgcagaaaattgatgccgcgctggcgcaggtggatgcgctgcgctctgatctgggtgcggtacaaaaccgtttcaactctgctatcaccaacctgggcaataccgtaaacaatctgtctgaagcgcgtagccgtatcgaagattccgactacgcgaccgaagtttccaacatgtctcgcgcgcagattttgcagcaggccggtacttccgttctggcgcaggctaaccaggtcccgcagaacgtgctgtctctgttacgtgaattctgcagatatccagcacagtggcggccgctcatggaaaaattgcagttgaagggaacaacctatggcgtctgttcaaaggctttcaagtttcttgggactcccgcagacacaggtcacggcactgtggtgttggaattgcagtacactggcacggatggaccttgcaaagttcctatctcgtcagtggcttcattgaacgacctaacgccagtgggcagattggtcactgtcaacccttttgtttcagtggccacggccaacgctaaggtcctgattgaattggaaccaccctttggagactcatacatagtggtgggcagaggagaacaacagatcaatcaccattggcacaagtctggaagcagcattggcaaacccttaataagc

SEQ ID NO: 635 - protein, 408 aa, Artificial Sequence
  STF2delta.EIII+
MAQVINTNSLSLLTQNNLNKSQSALGTAIERLSSGLRINSAKDDAAGQAIANRFTANIKGLTQASRNANDGISIAQTTEGALNEINNNLQRVRELAVQSANSTNSQSDLDSIQAEITQRLNEIDRVSGQTQFNGVKVLAQDNTLTIQVGANDGETIDIDLKQINSQTLGLDSLNVHGAPVDPASPWTENPLQKIDAALAQVDALRSDLGAVQNRFNSAITNLGNTVNNLSEARSRIEDSDYATEVSNMSRAQILQQAGTSVLAQANQVPQNVLSLLREFCRYPAQWRPLMEKLQLKGTTYGVCSKAFKFLGTPADTGHGTVVLELQYTGTDGPCKVPISSVASLNDLTPVGRLVTVNPFVSVATANAKVLIELEPPFGDSYIVVGRGEQQINHHWHKSGSSIGKPLIS

SEQ ID NO: 636 - DNA, 1899 bp, Artificial Sequence
  STF2.EIII+
atggcacaagtaatcaacactaacagtctgtcgctgctgacccagaataacctgaacaaatcccagtccgcactgggcaccgctatcgagcgtctgtcttctggtctgcgtatcaacagcgcgaaagacgatgcggcaggtcaggcgattgctaaccgtttcaccgcgaacatcaaaggtctgactcaggcttcccgtaacgctaacgacggtatctccattgcgcagaccactgaaggcgcgctgaacgaaatcaacaacaacctgcagcgtgtgcgtgaactggcggttcagtctgctaacagcaccaactcccagtctgacctcgactccatccaggctgaaatcacccagcgcctgaacgaaatcgaccgtgtatccggccagactcagttcaacggcgtgaaagtcctggcgcaggacaacaccctgaccatccaggttggcgccaacgacggtgaaactatcgatatcgatctgaagcagatcaactctcagaccctgggtctggactcactgaacgtgcagaaagcgtatgatgtgaaagatacagcagtaacaacgaaagcttatgccaataatggtactacactggatgtatcgggtcttgatgatgcagctattaaagcggctacgggtggtacgaatggtacggcttctgtaaccggtggtgcggttaaatttgacgcagataataacaagtactttgttactattggtggctttactggtgctgatgccgccaaaaatggcgattatgaagttaacgttgctactgacggtacagtaacccttgcggctggcgcaactaaaaccacaatgcctgctggtgcgacaactaaaacagaagtacaggagttaaaagatacaccggcagttgtttcagcagatgctaaaaatgccttaattgctggcggcgttgacgctaccgatgctaatggcgctgagttggtcaaaatgtcttataccgataaaaatggtaagacaattgaaggcggttatgcgcttaaagctggcgataagtattacgccgcagattacgatgaagcgacaggagcaattaaagctaaaactacaagttatactgctgctgacggcactaccaaaacagcggctaaccaactgggtggcgtagacggtaaaaccgaagtcgttactatcgacggtaaaacctacaatgccagcaaagccgctggtcatgatttcaaagcacaaccagagctggcggaagcagccgctaaaaccaccgaaaacccgctgcagaaaattgatgccgcgctggcgcaggtggatgcgctgcgctctgatctgggtgcggtacaaaaccgtttcaactctgctatcaccaacctgggcaataccgtaaacaatctgtctgaagcgcgtagccgtatcgaagattccgactacgcgaccgaagtttccaacatgtctcgcgcgcagattctgcagcaggccggtacttccgttctggcgcaggctaaccaggtcccgcagaacgtgctgtctctgttacgtgaattctgcagatatccagcacagtggcggccgctcatggaaaaattgcagttgaagggaacaacctatggcgtctgttcaaaggctttcaagtttcttgggactcccgcagacacaggtcacggcactgtggtgttggaattgcagtacactggcacggatggaccttgcaaagttcctatctcgtcagtggcttcattgaacgacctaacgccagtgggcagattggtcactgtcaacccttttgtttcagtggccacggccaacgctaaggtcctgattgaattggaaccaccctttggagactcatacatagtggtgggcagaggagaacaacagatcaatcaccattggcacaagtctggaagcagcattggcaaa

SEQ ID NO: 637 - protein, 633 aa, Artificial Sequence
  STF2.EIII+
MAQVINTNSLSLLTQNNLNKSQSALGTAIERLSSGLRINSAKDDAAGQAIANRFTANIKGLTQASRNANDGISIAQTTEGALNEINNNLQRVRELAVQSANSTNSQSDLDSIQAEITQRLNEIDRVSGQTQFNGVKVLAQDNTLTIQVGANDGETIDIDLKQINSQTLGLDSLNVQKAYDVKDTAVTTKAYANNGTTLDVSGLDDAAIKAATGGTNGTASVTGGAVKFDADNNKYFVTIGGFTGADAAKNGDYEVNVATDGTVTLAAGATKTTMPAGATTKTEVQELKDTPAVVSADAKNALIAGGVDATDANGAELVKMSYTDKNGKTIEGGYALKAGDKYYAADYDEATGAIKAKTTSYTAADGTTKTAANQLGGVDGKTEVVTIDGKTYNASKAAGHDFKAQPELAEAAAKTTENPLQKIDAALAQVDALRSDLGAVQNRFNSAITNLGNTVNNLSEARSRIEDSDYATEVSNMSRAQILQQAGTSVLAQANQVPQNVLSLLREFCRYPAQWRPLMEKLQLKGTTYGVCSKAFKFLGTPADTGHGTVVLELQYTGTDGPCKVPISSVASLNDLTPVGRLVTVNPFVSVATANAKVLIELEPPFGDSYIVVGRGEQQINHHWHKSGSSIGK

SEQ ID NO: 638 - DNA, 1143 bp, Artificial Sequence
  STF2delta.EIII+
atggcacaagtaatcaacactaacagtctgtcgctgctgacccagaataacctgaacaaatcccagtccgcactgggcaccgctatcgagcgtctgtcttctggtctgcgtatcaacagcgcgaaagacgatgcggcaggtcaggcgattgctaaccgtttcaccgcgaacatcaaaggtctgactcaggcttcccgtaacgctaacgacggtatctccattgcgcagaccactgaaggcgcgctgaacgaaatcaacaacaacctgcagcgtgtgcgtgaactggcggttcagtctgctaacagcaccaactcccagtctgacctcgactccatccaggctgaaatcacccagcgcctgaacgaaatcgaccgtgtatccggccagactcagttcaacggcgtgaaagtcctggcgcaggacaacaccctgaccatccaggttggcgccaacgacggtgaaactatcgatatcgatctgaagcagatcaactctcagaccctgggtctggactcactgaacgtgaccgaaaacccgctgcagaaaattgatgccgcgctggcgcaggtggatgcgctgcgctctgatctgggtgcggtacaaaaccgtttcaactctgctatcaccaacctgggcaataccgtaaacaatctgtctgaagcgcgtagccgtatcgaagattccgactacgcgaccgaagtttccaacatgtctcgcgcgcagattctgcagcaggccggtacttccgttctggcgcaggctaaccaggtcccgcagaacgtgctgtctctgttacgtatggaaaaattgcagttgaagggaacaacctatggcgtctgttcaaaggctttcaagtttcttgggactcccgcagacacaggtcacggcactgtggtgttggaattgcagtacactggcacggatggaccttgcaaagttcctatctcgtcagtggcttcattgaacgacctaacgccagtgggcagattggtcactgtcaacccttttgtttcagtggccacggccaacgctaaggtcctgattgaattggaaccaccctttggagactcatacatagtggtgggcagaggagaacaacagatcaatcaccattggcacaagtctggaagcagcattggcaaa

SEQ ID NO: 639 - protein, 381 aa, Artificial Sequence
  STF2delta.EIII+
MAQVINTNSLSLLTQNNLNKSQSALGTAIERLSSGLRINSAKDDAAGQAIANRFTANIKGLTQASRNANDGISIAQTTEGALNEINNNLQRVRELAVQSANSTNSQSDLDSIQAEITQRLNEIDRVSGQTQFNGVKVLAQDNTLTIQVGANDGETIDIDLKQINSQTLGLDSLNVTENPLQKIDAALAQVDALRSDLGAVQNRFNSAITNLGNTVNNLSEARSRIEDSDYATEVSNMSRAQILQQAGTSVLAQANQVPQNVLSLLRMEKLQLKGTTYGVCSKAFKFLGTPADTGHGTVVLELQYTGTDGPCKVPISSVASLNDLTPVGRLVTVNPFVSVATANAKVLIELEPPFGDSYIVVGRGEQQINHHWHKSGSSIGK

SEQ ID NO: 640 - protein, 406 aa, Artificial Sequence
  West Nile virus envelope
FNCLGMSNRDFLEGVSGATWVDLVLEGDSCVTIMSKDKPTIDVKMMNMEAANLAEVRSYCYLATVSDLSTKAACPTMGEAHNDKRADPAFVCRQGVVDRGWGNGCGLFGKGSIDTCAKFACSTKAIGRTILKENIKYEVAIFVHGPTTVESHGNYSTQVGATQAGRFSITPAAPSYTLKLGEYGEVTVDCEPRSGIDTNAYYVMTVGTKTFLVHREWFMDLNLPWSSAGSTVWRNRETLMEFEEPHATKQSVIALGSQEGALHQALAGAIPVEFSSNTVKLTSGHLKCRVKMEKLQLKGTTYGVCSKAFKFLGTPADTGHGTVVLELQYTGTDGPCKVPISSVASLNDLTPVGRLVTVNPFVSVATANAKVLIELEPPFGDSYIVVGRGEQQINHHWHKSGSSIGK

SEQ ID NO: 641 - protein, 99 aa, Artificial Sequence
  flavivirus
GMSYSMCTGKFKVVKEIAETQHGTIVIRVQYEGDGSPCKIPFEIMDLEKRHVLGRLITVNPIVTEKDSPVNIEAEPPFGDSYIIIGVEPGQLKLNWFKK

SEQ ID NO: 642 - DNA, 38 bp, Artificial Sequence; identical to SEQ ID NO: 317
  primer

SEQ ID NO: 643 - DNA, 41 bp, Artificial Sequence; identical to SEQ ID NO: 318
  primer

SEQ ID NO: 644 - DNA, 42 bp, Artificial Sequence; identical to SEQ ID NO: 319
  primer

SEQ ID NO: 645 - DNA, 84 bp, Artificial Sequence; identical to SEQ ID NO: 320
  primer

SEQ ID NO: 646 - DNA, 20 bp, Artificial Sequence
  primer
tccggcgtagaggatcgaga

SEQ ID NO: 647 - DNA, 54 bp, Artificial Sequence
  primer
caattgaccttcaagcttcgaattgcccttacgtaacagagacagcacgttctg

SEQ ID NO: 648 - DNA, 57 bp, Artificial Sequence
  primer
aagcttgaaggtcaattggaattccctaggactagtatggaaaaattgcagttgaag

SEQ ID NO: 649 - DNA, 20 bp, Artificial Sequence
  primer
gcttaatgcgccgctacagg

SEQ ID NO: 650 - DNA, 40 bp, Artificial Sequence
  primer
gcggccgctcatggaaaaattgcagttgaagggaacaacc

SEQ ID NO: 651 - DNA, 32 bp, Artificial Sequence
  primer
ccgcggtttgccaatgctgcttccagacttgt

SEQ ID NO: 652 - DNA, 49 bp, Artificial Sequence
  primer
ccggcatgccatatggcacaagtaatcaacactaacagtctgtcgctgc

SEQ ID NO: 653 - DNA, 49 bp, Artificial Sequence
  primer
gcatgctcagcttattaagggtttgccaatgctgcttcccagacttgtg

SEQ ID NO: 654 - DNA, 27 bp, Artificial Sequence
  primer
tacgtgaattcagcagatatccagcac

SEQ ID NO: 655 - DNA, 1911 bp, Artificial Sequence
  STF2.EIII+
atggcacaagtaatcaacactaacagtctgtcgctgctgacccagaataacctgaacaaatcccagtccgcactgggcaccgctatcgagcgtctgtcttctggtctgcgtatcaacagcgcgaaagacgatgcggcaggtcaggcgattgctaaccgtttcaccgcgaacatcaaaggtctgactcaggcttcccgtaacgctaacgacggtatctccattgcgcagaccactgaaggcgcgctgaacgaaatcaacaacaacctgcagcgtgtgcgtgaactggcggttcagtctgctaacagcaccaactcccagtctgacctcgactccatccaggctgaaatcacccagcgcctgaacgaaatcgaccgtgtatccggccagactcagttcaacggcgtgaaagtcctggcgcaggacaacaccctgaccatccaggttggcgccaacgacggtgaaactatcgatatcgatctgaagcagatcaactctcagaccctgggtctggactcactgaacgtgcagaaagcgtatgatgtgaaagatacagcagtaacaacgaaagcttatgccaataatggtactacactggatgtatcgggtcttgatgatgcagctattaaagcggctacgggtggtacgaatggtacggcttctgtaaccggtggtgcggttaaatttgacgcagataataacaagtactttgttactattggtggctttactggtgctgatgccgccaaaaatggcgattatgaagttaacgttgctactgacggtacagtaacccttgcggctggcgcaactaaaaccacaatgcctgctggtgcgacaactaaaacagaagtacaggagttaaaagatacaccggcagttgtttcagcagatgctaaaaatgccttaattgctggcggcgttgacgctaccgatgctaatggcgctgagttggtcaaaatgtcttataccgataaaaatggtaagacaattgaaggcggttatgcgcttaaagctggcgataagtattacgccgcagattacgatgaagcgacaggagcaattaaagctaaaactacaagttatactgctgctgacggcactaccaaaacagcggctaaccaactgggtggcgtagacggtaaaaccgaagtcgttactatcgacggtaaaacctacaatgccagcaaagccgctggtcatgatttcaaagcacaaccagagctggcggaagcagccgctaaaaccaccgaaaacccgctgcagaaaattgatgccgcgctggcgcaggtggatgcgctgcgctctgatctgggtgcggtacaaaaccgtttcaactctgctatcaccaacctgggcaataccgtaaacaatctgtctgaagcgcgtagccgtatcgaagattccgactacgcgaccgaagtttccaacatgtctcgcgcgcagattctgcagcaggccggtacttccgttctggcgcaggctaaccaggtcccgcagaacgtgctgtctctgttacgtaagggcaattcgaagcttgaaggtcaattggaattccctaggactagtatggaaaaattgcagttgaagggaacaacctatggcgtctgttcaaaggctttcaagtttcttgggactcccgcagacacaggtcacggcactgtggtgttggaattgcagtacactggcacggatggaccttgcaaagttcctatctcgtcagtggcttcattgaacgacctaacgccagtgggcagattggtcactgtcaacccttttgtttcagtggccacggccaacgctaaggtcctgattgaattggaaccaccctttggagactcatacatagtggtgggcagaggagaacaacagatcaatcaccattggcacaagtctggaagcagcattggcaaa

SEQ ID NO: 656 - protein, 637 aa, Artificial Sequence
  STF2.EIII+
MAQVINTNSLSLLTQNNLNKSQSALGTAIERLSSGLRINSAKDDAAGQAIANRFTANIKGLTQASRNANDGISIAQTTEGALNEINNNLQRVRELAVQSANSTNSQSDLDSIQAEITQRLNEIDRVSGQTQFNGVKVLAQDNTLTIQVGANDGETIDIDLKQINSQTLGLDSLNVQKAYDVKDTAVTTKAYANNGTTLDVSGLDDAAIKAATGGTNGTASVTGGAVKFDADNNKYFVTIGGFTGADAAKNGDYEVNVATDGTVTLAAGATKTTMPAGATTKTEVQELKDTPAVVSADAKNALIAGGVDATDANGAELVKMSYTDKNGKTIEGGYALKAGDKYYAADYDEATGAIKAKTTSYTAADGTTKTAANQLGGVDGKTEVVTIDGKTYNASKAAGHDFKAQPELAEAAAKTTENPLQKIDAALAQVDALRSDLGAVQNRFNSAITNLGNTVNNLSEARSRIEDSDYATEVSNMSRAQILQQAGTSVLAQANQVPQNVLSLLRKGNSKLEGQLEFPRTSMEKLQLKGTTYGVCSKAFKFLGTPADTGHGTVVLELQYTGTDGPCKVPISSVASLNDLTPVGRLVTVNPFVSVATANAKVLIELEPPFGDSYIVVGRGEQQINHHWHKSGSSIGK

SEQ ID NO: 657 - protein, 10 aa, Artificial Sequence
  Linker
GAPVDPASPW

SEQ ID NO: 658 - DNA, 1218 bp, Artificial Sequence
  West Nile virus envelope protein
ttcaactgccttggaatgagcaacagagacttcttggaaggagtgtctggagcaacatgggtggatttggttctcgaaggcgacagctgcgtgactatcatgtctaaggacaagcctaccatcgatgtgaagatgatgaatatggaggcggccaacctggcagaggtccgcagttattgctatttggctaccgtcagcgatctctccaccaaagctgcgtgcccgaccatgggagaagctcacaatgacaaacgtgctgacccagcttttgtgtgcagacaaggagtggtggacaggggctggggcaacggctgcggactatttggcaaaggaagcattgacacatgcgccaaatttgcctgctctaccaaggcaataggaagaaccatcttgaaagagaatatcaagtacgaagtggccatttttgtccatggaccaactactgtggagtcgcacggaaactactccacacaggttggagccactcaggcagggagattcagcatcactcctgcagcgccttcatacacactaaagcttggagaatatggagaggtgacagtggactgtgaaccacggtcagggattgacaccaatgcatactacgtgatgactgttggaacaaagacgttcttggtccatcgtgagtggttcatggacctcaacctcccttggagcagtgctggaagtactgtgtggaggaacagagagacgttaatggagtttgaggaaccacacgccacgaagcagtctgtgatagcattgggctcacaagagggagctctgcatcaagctttggctggagccattcctgtggaattttcaagcaacactgtcaagttgacgtcgggtcatttgaagtgtagagtgaagatggaaaaattgcagttgaagggaacaacctatggcgtctgttcaaaggctttcaagtttcttgggactcccgcagacacaggtcacggcactgtggtgttggaattgcagtacactggcacggatggaccttgcaaagttcctatctcgtcagtggcttcattgaacgacctaacgccagtgggcagattggtcactgtcaacccttttgtttcagtggccacggccaacgctaaggtcctgattgaattggaaccaccctttggagactcatacatagtggtgggcagaggagaacaacagatcaatcaccattggcacaagtctggaagcagcattggcaaa

SEQ ID NO: 659 - protein, 506 aa, S. muenchen; identical to SEQ ID NO: 503

SEQ ID NO: 660 - DNA, 1521 bp, S. muenchen
atggcacaagtcattaatacaaacagcctgtcgctgttgacccagaataacctgaacaaatcccagtccgctctgggcaccgctatcgagcgtctgtcttccggtctgcgtatcaacagcgcgaaagacgatgcggcaggtcaggcgattgctaaccgtttcaccgcgaacatcaaaggtctgactcaggcttcccgtaacgctaacgacggtatctccattgcgcagaccactgaaggcgcgctgaacgaaatcaacaacaacctgcagcgtgtgcgtgaactggcggttcagtctgctaacggtactaactcccagtctgaccttgactctatccaggctgaaatcacccagcgtctgaacgaaatcgaccgtgtatccggtcagactcagttcaacggcgtgaaagtcctggcgcaggacaacaccctgaccatccaggttggtgccaacgacggtgaaactattgatattgatttaaaagaaattagctctaaaacactgggacttgataagcttaatgtccaggatgcctacaccccgaaagaaactgctgtaaccgttgataaaactacctataaaaatggtacagatactattacagcccagagcaatactgatatccaaactgcaattggcggtggtgcaacgggggttactggggctgatatcaaatttaaagatggtcaatactatttagatgttaaaggcggtgcttctgctggtgtttataaagccacttatgatgaaactacaaagaaagttaatattgatacgactgataaaactccgttagcaactgcggaagctacagctattcggggaacggccactataacccacaaccaaattgctgaagtaacaaaagagggtgttgatacgaccacagttgcggctcaacttgctgctgcaggggttactggtgccgataaggacaatactagccttgtaaaactatcgtttgaggataaaaacggtaaggttattgatggtggctatgcagtgaaaatgggcgacgatttctatgccgctacatatgatgagaaaacaggtacaattactgctaaaacaaccacttatacagatggtgctggcgttgctcaaactggagctgtgaaatttggtggcgcaaatggtaaatctgaagttgttactgctaccgatggtaaaacttacttagcaagcgaccttgacaaacataacttcagaacaggcggtgagcttaaagaggttaatacagataagactgaaaacccactgcagaaaattgatgctgccttggcacaggttgatacacttcgttctgacctgggtgcggtacagaaccgtttcaactccgctatcaccaacctgggcaataccgtaaataacctgtcttctgcccgtagccgtatcgaagattccgactacgcgaccgaagtctccaacatgtctcgcgcgcagattctgcagcaggccggtacctccgttctggcgcaggctaaccaggttccgcaaaacgtcctctctttactgcgttaa

SEQ ID NO: 661 - protein, 12 aa, Artificial Sequence
  Linker
EFSRYPAQWRPL

SEQ ID NO: 662 - DNA, 36 bp, Artificial Sequence; identical to SEQ ID NO: 524
  Linker

SEQ ID NO: 663 - protein, 45 aa, Artificial Sequence; identical to SEQ ID NO: 525
  Linker

SEQ ID NO: 664 - DNA, 135 bp, Artificial Sequence; identical to SEQ ID NO: 526
  Linker

SEQ ID NO: 665 - protein, 192 aa, Artificial Sequence
  Hepatitis C E1
YQVRNSTGLYHVTNDCPNSSIVYEAADAILHTPGCVPCVREGNASRCWVAMTPTVATRDGKLPATQLRRHIDLLVGSATLCSALYVGDLCGSVFLVGQLFTFSPRRHWTTQGCNCSIYPGHITGHRMAWDMMMNWSPTTALVMAQLLRIPQAILDMIAGAHWGVLAGIAYFSMVGNWAKVLVVLLLFAGVDA

SEQ ID NO: 666 - protein, 363 aa, Artificial Sequence
  Hepatitis C E2
ETHVTGGSAGHTVSGFVSLLAPGAKQNVQLINTNGSWHLNSTALNCNDSLNTGWLAGLFYHHKFNSSGCPERLASCRPLTDFDQGWGPISYANGSGPDQRPYCWHYPPKPCGIVPAKSVCGPVYCFTPSPVVVGTTDRSGAPTYSWGENDTDVFVLNNTRPPLGNWFGCTWMNSTGFTKVCGAPPCVIGGAGNNTLHCPTDCFRKHPDATYSRCGSGPWITPRCLVDYPYRLWHYPCTINYTIFKIRMYVGGVEHRLEAACNWTRGERCDLEDRDRSELSPLLLTTTQWQVLPCSFTTLPALSTGLIHLHQNIVDVQYLYGVGSSIASWAIKWEYVVLLFLLLADARVCSCLWMMLLISQAEA

SEQ ID NO: 667 - DNA, 576 bp, Artificial Sequence
  Hepatitis C E1
taccaagtgcgcaactccacggggctctaccacgtcaccaatgattgccctaactcgagtattgtgtacgaggcggccgatgccatcctgcacactccggggtgcgtcccttgcgttcgcgagggcaacgcctcgaggtgttgggtggcgatgacccctacggtggccaccagggatggcaaactccccgcgacgcagcttcgacgtcacatcgatctgcttgtcgggagcgccaccctctgttcggccctctacgtgggggacctgtgcgggtctgtctttcttgtcggccaactgtttaccttctctcccaggcgccactggacgacgcaaggttgcaattgctctatctatcccggccatataacgggtcaccgcatggcatgggatatgatgatgaactggtcccctacgacggcgttggtaatggctcagctgctccggatcccacaagccatcttggacatgatcgctggtgctcactggggagtcctggcgggcatagcgtatttctccatggtggggaactgggcgaaggtcctggtagtgctgctgctatttgccggcgtcgacgcg

SEQ ID NO: 668 - DNA, 1089 bp, Artificial Sequence
  Hepatitis C E2
gaaacccacgtcaccgggggaagtgccggccacactgtgtctggatttgttagcctcctcgcaccaggcgccaagcagaacgtccagctgatcaacaccaacggcagttggcacctcaatagcacggccctgaactgcaatgatagcctcaacaccggctggttggcagggcttttctatcaccacaagttcaactcttcaggctgtcctgagaggctagccagctgccgaccccttaccgattttgaccagggctggggccctatcagttatgccaacggaagcggccccgaccagcgcccctactgctggcactaccccccaaaaccttgcggtattgtgcccgcgaagagtgtgtgtggtccggtatattgcttcactcccagccccgtggtggtgggaacgaccgacaggtcgggcgcgcccacctacagctggggtgaaaatgatacggacgtcttcgtccttaacaataccaggccaccgctgggcaattggttcggttgtacctggatgaactcaactggattcaccaaagtgtgcggagcgcctccttgtgtcatcggaggggcgggcaacaacaccctgcactgccccactgattgcttccgcaagcatccggacgccacatactctcggtgcggctccggtccctggatcacacccaggtgcctggtcgactacccgtataggctttggcattatccttgtaccatcaactacactatatttaaaatcaggatgtacgtgggaggggtcgagcacaggctggaagctgcctgcaactggacgcggggcgaacgttgcgatctggaagatagggacaggtccgagctcagcccgttactgctgaccactacacagtggcaggtcctcccgtgttccttcacaaccctgccagccttgtccaccggcctcatccacctccaccagaacattgtggacgtgcagtacttgtacggggtggggtcaagcatcgcgtcctgggccattaagtgggagtacgtcgtcctcctgttccttctgcttgcagacgcgcgcgtctgctcctgcttgtggatgatgctactcatatcccaagcggaagcg

SEQ ID NO: 669 - protein, 595 aa, E. coli
MAQVINTNSLSLITQNNINKNQSALSSSIERLSSGLRINSAKDDAAGQAIANRFTSNIKGLTQAARNANDGISVAQTTEGALSEINNNLQRIRELTVQASTGTNSDSDLDSIQDEIKSRLDEIDRVSGQTQFNGVNVLAKDGSMKIQVGANDGQTITIDLKKIDSDTLGLNGFNVNGSGTIANKAATISDLTAAKMDAATNTITTTNNALTASKALDQLKDGDTVTIKADAAQTATVYTYNASAGNFSFSNVSNNTSAKAGDVAASLLPPAGQTASGVYKAASGEVNFDVDANGKITIGGQKAYLTSDGNLTTNDAGGATAATLDGLFKKAGDGQSIGFKKTASVTMGGTTYNFKTGADADAATANAGVSFTDTASKETVLNKVATAKQGKAVAADGDTSATITYKSGVQTYQAVFAAGDGTASAKYADKADVSNATATYTDADGEMTTIGSYTTKYSIDANNGKVTVDSGTGTGKYAPKVGAEVYVSANGTLTTDATSEGTVTKDPLKALDEAISSIDKFRSSLGAIQNRLDSAVTNLNNTTTNLSEAQSRIQDADYATEVSNMSKAQIIQQAGNSVLAKANQVPQQVLSLLQG

SEQ ID NO: 670 - DNA, 1788 bp, E. coli
atggcacaagtcattaataccaacagcctctcgctgatcactcaaaataatatcaacaagaaccagtctgcgctgtcgagttctatcgagcgtctgtcttctggcttgcgtattaacagcgcgaaggatgacgcagcgggtcaggcgattgctaaccgtttcacctctaacattaaaggcctgactcaggcggcccgtaacgccaacgacggtatctccgttgcgcagaccaccgaaggcgcgctgtccgaaatcaacaacaacttacagcgtatccgtgaactgacggttcaggcttctaccgggactaactccgattcggatctggactccattcaggacgaaatcaaatcccgtctggacgaaattgaccgcgtatctggccagacccagttcaacggcgtgaacgtactggcgaaagacggttcaatgaaaattcaggttggtgcgaatgacggccagactatcacgattgatctgaagaaaattgactcagatacgctggggctgaatggttttaacgtgaatggttccggtacgatagccaataaagcggcgaccattagcgacctgacagcagcgaaaatggatgctgcaactaatactataactacaacaaataatgcgctgactgcatcaaaggcgcttgatcaactgaaagatggtgacactgttactatcaaagcagatgctgctcaaactgccacggtttatacatacaatgcatcagctggtaacttctcattcagtaatgtatcgaataatacttcagcaaaagcaggtgatgtagcagctagccttctcccgccggctgggcaaactgctagtggtgtttataaagcagcaagcggtgaagtgaactttgatgttgatgcgaatggtaaaatcacaatcggaggacagaaagcatatttaactagtgatggtaacttaactacaaacgatgctggtggtgcgactgcggctacgcttgatggtttattcaagaaagctggtgatggtcaatcaatcgggtttaagaagactgcatcagtcacgatggggggaacaacttataactttaaaacgggtgctgatgctgatgctgcaactgctaacgcaggggtatcgttcactgatacagctagcaaagaaaccgttttaaataaagtggctacagctaaacaaggcaaagcagttgcagctgacggtgatacatccgcaacaattacctataaatctggcgttcagacgtatcaggctgtatttgccgcaggtgacggtactgctagcgcaaaatatgccgataaagctgacgtttctaatgcaacagcaacatacactgatgctgatggtgaaatgactacaattggttcatacaccacgaagtattcaatcgatgctaacaacggcaaggtaactgttgattctggaactggtacgggtaaatatgcgccgaaagtaggggctgaagtatatgttagtgctaatggtactttaacaacagatgcaactagcgaaggcacagtaacaaaagatccactgaaagctctggatgaagctatcagctccatcgacaaattccgttcttccctgggtgctatccagaaccgtctggattccgcagtcaccaacctgaacaacaccactaccaacctgtccgaagcgcagtcccgtattcaggacgccgactatgcgaccgaagtgtccaacatgtcgaaagcgcagatcattcagcaggccggtaactccgtgctggcaaaagccaaccaggtaccgcagcaggttctgtctctgctgcagggttaa

SEQ ID NO: 671 - DNA, 1224 bp, Artificial Sequence; identical to SEQ ID NO: 634
  STF2delta.EIII+

SEQ ID NO: 672 - protein, 408 aa, Artificial Sequence; identical to SEQ ID NO: 635
  STF2delta.EIII+

SEQ ID NO: 673 - protein, 408 aa, Artificial Sequence
  STF2delta.EIII+
MAQVINTNSLSLLTQNNLNKSQSALGTAIERLSSGLRINSAKDDAAGQAIANRFTANIKGLTQASRNANDGISIAQTTEGALNEINNNLQRVRELAVQSANSTNSQSDLDSIQAEITQRLNEIDRVSGQTQFNGVKVLAQDNTLTIQVGANDGETIDIDLKQINSQTLGLDSLNVHGAPVDPASPWTENPLQKIDAALAQVDALRSDLGAVQNRFNSAITNLGNTVNNLSEARSRIEDSDYATEVSNMSRAQILQQAGTSVLAQANQVPQNVLSLLREFSRYPAQWRPLMEKLQLKGTTYGVCSKAFKFLGTPADTGHGTVVLELQYTGTDGPCKVPISSVASLNDLTPVGRLVTVNPFVSVATANAKVLIELEPPFGDSYIVVGRGEQQINHHWHKSGSSIGKPLIS

SEQ ID NO: 674 - DNA, 1227 bp, Artificial Sequence
  STF2delta.EIII+
atggcacaagtaatcaacactaacagtctgtcgctgctgacccagaataacctgaacaaatcccagtccgcactgggcaccgctatcgagcgtctgtcttctggtctgcgtatcaacagcgcgaaagacgatgcggcaggtcaggcgattgctaaccgtttcaccgcgaacatcaaaggtctgactcaggcttcccgtaacgctaacgacggtatctccattgcgcagaccactgaaggcgcgctgaacgaaatcaacaacaacctgcagcgtgtgcgtgaactggcggttcagtctgctaacagcaccaactcccagtctgacctcgactccatccaggctgaaatcacccagcgcctgaacgaaatcgaccgtgtatccggccagactcagttcaacggcgtgaaagtcctggcgcaggacaacaccctgaccatccaggttggcgccaacgacggtgaaactatcgatatcgatctgaagcagatcaactctcagaccctgggtctggactcactgaacgtgcatggagcgccggtggatcctgctagcccatggaccgaaaacccgctgcagaaaattgatgccgcgctggcgcaggtggatgcgctgcgctctgatctgggtgcggtacaaaaccgtttcaactctgctatcaccaacctgggcaataccgtaaacaatctgtctgaagcgcgtagccgtatcgaagattccgactacgcgaccgaagtttccaacatgtctcgcgcgcagattttgcagcaggccggtacttccgttctggcgcaggctaaccaggtcccgcagaacgtgctgtctctgttacgtgaattctctagatatccagcacagtggcggccgctcatggaaaaattgcagttgaagggaacaacctatggcgtctgttcaaaggctttcaagtttcttgggactcccgcagacacaggtcacggcactgtggtgttggaattgcagtacactggcacggatggaccttgcaaagttcctatctcgtcagtggcttcattgaacgacctaacgccagtgggcagattggtcactgtcaacccttttgtttcagtggccacggccaacgctaaggtcctgattgaattggaaccaccctttggagactcatacatagtggtgggcagaggagaacaacagatcaatcaccattggcacaagtctggaagcagcattggcaaacccttaataagctga

SEQ ID NO: 675 - DNA, 35 bp, Artificial Sequence
  Linker
gaattctctagatatccagcacagtggcggccgct

SEQ ID NO: 676 - protein, 12 aa, Artificial Sequence
  Linker
EFSRYPAQWRPL

SEQ ID NO: 677 - protein, 405 aa, Artificial Sequence
  pET/STF2delta.JEIII+
MAQVINTNSLSLLTQNNLNKSQSALGTAIERLSSGLRINSAKDDAAGQAIANRFTANIKGLTQASRNANDGISIAQTTEGALNEINNNLQRVRELAVQSANSTNSQSDLDSIQAEITQRLNEIDRVSGQTQFNGVKVLAQDNTLTIQVGANDGETIDIDLKQINSQTLGLDSLNVHGAPVDPASPWTENPLQKIDAALAQVDALRSDLGAVQNRFNSAITNLGNTVNNLSEARSRIEDSDYATEVSNMSRAQILQQAGTSVLAQANQVPQNVLSLLREFSRYPAQWRPLMDKLALKGTTYGMCTEKFSFAKNPVDTGHGTVVIELSYSGSDGPCKIPIVSVASLNDMTPVGRLVTVNPFVATSSANSKVLVEMEPPFGDSYIVVGRGDKQINHHWHKAGSTLGKA

SEQ ID NO: 678 - DNA, 1215 bp, Artificial Sequence
  pET/STF2delta.JEIII+
atggcacaagtaatcaacactaacagtctgtcgctgctgacccagaataacctgaacaaatcccagtccgcactgggcaccgctatcgagcgtctgtcttctggtctgcgtatcaacagcgcgaaagacgatgcggcaggtcaggcgattgctaaccgtttcaccgcgaacatcaaaggtctgactcaggcttcccgtaacgctaacgacggtatctccattgcgcagaccactgaaggcgcgctgaacgaaatcaacaacaacctgcagcgtgtgcgtgaactggcggttcagtctgctaacagcaccaactcccagtctgacctcgactccatccaggctgaaatcacccagcgcctgaacgaaatcgaccgtgtatccggccagactcagttcaacggcgtgaaagtcctggcgcaggacaacaccctgaccatccaggttggcgccaacgacggtgaaactatcgatatcgatctgaagcagatcaactctcagaccctgggtctggactcactgaacgtgcatggagcgccggtggatcctgctagcccatggaccgaaaacccgctgcagaaaattgatgccgcgctggcgcaggtggatgcgctgcgctctgatctgggtgcggtacaaaaccgtttcaactctgctatcaccaacctgggcaataccgtaaacaatctgtctgaagcgcgtagccgtatcgaagattccgactacgcgaccgaagtttccaacatgtctcgcgcgcagattttgcagcaggccggtacttccgttctggcgcaggctaaccaggtcccgcagaacgtgctgtctctgttacgtgaattcagcagatatccagcacagtggcggccgctcatggacaaactggctctgaaaggcacaacctatggcatgtgtacagaaaaattctcgttcgcgaaaaatccggtggacactggtcacggaacagttgtcattgaactctcctactctgggagtgatggcccctgcaaaattccgattgtttccgttgcgagcctcaatgacatgacccccgttgggcggctggtgacagtgaaccccttcgtcgcgacttccagtgccaactcaaaggtgctggtcgagatggaaccccccttcggagactcctacatcgtagttggaaggggagacaagcagatcaaccaccattggcacaaagctggaagcacgctgggcaaggcc

SEQ ID NO: 679 - DNA, 348 bp, Artificial Sequence
  JEIII+
atggacaaactggctctgaaaggcacaacctatggcatgtgtacagaaaaattctcgttcgcgaaaaatccggtggacactggtcacggaacagttgtcattgaactctcctactctgggagtgatggcccctgcaaaattccgattgtttccgttgcgagcctcaatgacatgacccccgttgggcggctggtgacagtgaaccccttcgtcgcgacttccagtgccaactcaaaggtgctggtcgagatggaaccccccttcggagactcctacatcgtagttggaaggggagacaagcagatcaaccaccattggcacaaagctggaagcacgctgggcaaggcc

SEQ ID NO: 680 - protein, 116 aa, Artificial Sequence
  JEIII+
MDKLALKGTTYGMCTEKFSFAKNPVDTGHGTVVIELSYSGSDGPCKIPIVSVASLNDMTPVGRLVTVNPFVATSSANSKVLVEMEPPFGDSYIVVGRGDKQINHHWHKAGSTLGKA

SEQ ID NO: 681 - protein, 389 aa, Artificial Sequence
  pET/STF2delta.Den1 EIII
MAQVINTNSLSLLTQNNLNKSQSALGTAIERLSSGLRINSAKDDAAGQAIANRFTANIKGLTQASRNANDGISIAQTTEGALNEINNNLQRVRELAVQSANSTNSQSDLDSIQAEITQRLNEIDRVSGQTQFNGVKVLAQDNTLTIQVGANDGETIDIDLKQINSQTLGLDSLNVHGAPVDPASPWTENPLQKIDAALAQVDALRSDLGAVQNRFNSAITNLGNTVNNLSEARSRIEDSDYATEVSNMSRAQILQQAGTSVLAQANQVPQNVLSLLREFSRYPAQWRPLKGMSYVMCTGSFKLEKEVAETQHGTVLVQVKYEGTDAPCKIPFSTQDEKGVTQNGRLITANPIVTDKEKPVNIEAEPPFGENYIVVGAGEKALKLSWFKK

SEQ ID NO: 682 - DNA, 1185 bp, Artificial Sequence
  pET/STF2delta.Den1 EIII
atggcacaagtaatcaacactaacagtctgtcgctgctgacccagaataacctgaacaaatcccagtccgcactgggcaccgctatcgagcgtctgtcttctggtctgcgtatcaacagcgcgaaagacgatgcggcaggtcaggcgattgctaaccgtttcaccgcgaacatcaaaggtctgactcaggcttcccgtaacgctaacgacggtatctccattgcgcagaccactgaaggcgcgctgaacgaaatcaacaacaacctgcagcgtgtgcgtgaactggcggttcagtctgctaacagcaccaactcccagtctgacctcgactccatccaggctgaaatcacccagcgcctgaacgaaatcgaccgtgtatccggccagactcagttcaacggcgtgaaagtcctggcgcaggacaacaccctgaccatccaggttggcgccaacgacggtgaaactatcgatatcgatctgaagcagatcaactctcagaccctgggtctggactcactgaacgtgcatggagcgccggtggatcctgctagcccatggaccgaaaacccgctgcagaaaattgatgccgcgctggcgcaggtggatgcgctgcgctctgatctgggtgcggtacaaaaccgtttcaactctgctatcaccaacctgggcaataccgtaaacaatctgtctgaagcgcgtagccgtatcgaagattccgactacgcgaccgaagtttccaacatgtctcgcgcgcagattttgcagcaggccggtacttccgttctggcgcaggctaaccaggtcccgcagaacgtgctgtctctgttacgtgaattcagcagatatccagcacagtggcggccgctcaaaggaatgtcttacgtaatgtgcacaggcagtttcaagctggaaaaagaagttgccgaaacacagcatggcacggtactagtccaagtgaaatatgagggaacagacgcgccatgtaagataccattttccactcaagatgagaaaggggcgactcagaacggaagattgataaccgcaaatcctatcgtaaccgacaaggaaaagcccgtgaatattgaggcagagcctccgtttggggagtcgtatatcgtcgttggtgctggtgaaaaggctttaaagctcagttggttcaaaaaggggtcaagcattggtaaa

SEQ ID NO: 683 - protein, 389 aa, Artificial Sequence
  pET/STF2delta.Den2 EIII
MAQVINTNSLSLLTQNNLNKSQSALGTAIERLSSGLRINSAKDDAAGQAIANRFTANIKGLTQASRNANDGISIAQTTEGALNEINNNLQRVRELAVQSANSTNSQSDLDSIQAEITQRLNEIDRVSGQTQFNGVKVLAQDNTLTIQVGANDGETIDIDLKQINSQTLGLDSLNVHGAPVDPASPWTENPLQKIDAALAQVDALRSDLGAVQNRFNSAITNLGNTVNNLSEARSRIEDSDYATEVSNMSRAQILQQAGTSVLAQANQVPQNVLSLLREFSRYPAQWRPLKGMSYSMCTGKFKVVKEIAETQHGTIVIRVQYEGDGSPCKTPFEIMDLEKRHVLGRLTTVNPIVTEKDSPVNIEAEPPFGDSYIIIGVEPGQLKLDWFKK

SEQ ID NO: 684 - DNA, 1185 bp, Artificial Sequence
  pET/STF2delta.Den2 EIII
atggcacaagtaatcaacactaacagtctgtcgctgctgacccagaataacctgaacaaatcccagtccgcactgggcaccgctatcgagcgtctgtcttctggtctgcgtatcaacagcgcgaaagacgatgcggcaggtcaggcgattgctaaccgtttcaccgcgaacatcaaaggtctgactcaggcttcccgtaacgctaacgacggtatctccattgcgcagaccactgaaggcgcgctgaacgaaatcaacaacaacctgcagcgtgtgcgtgaactggcggttcagtctgctaacagcaccaactcccagtctgacctcgactccatccaggctgaaatcacccagcgcctgaacgaaatcgaccgtgtatccggccagactcagttcaacggcgtgaaagtcctggcgcaggacaacaccctgaccatccaggttggcgccaacgacggtgaaactatcgatatcgatctgaagcagatcaactctcagaccctgggtctggactcactgaacgtgcatggagcgccggtggatcctgctagcccatggaccgaaaacccgctgcagaaaattgatgccgcgctggcgcaggtggatgcgctgcgctctgatctgggtgcggtacaaaaccgtttcaactctgctatcaccaacctgggcaataccgtaaacaatctgtctgaagcgcgtagccgtatcgaagattccgactacgcgaccgaagtttccaacatgtctcgcgcgcagattttgcagcaggccggtacttccgttctggcgcaggctaaccaggtcccgcagaacgtgctgtctctgttacgtgaattcagcagatatccagcacagtggcggccgctcaaaggtatgagctatagcatgtgtaccggtaaatttaaagttgttaaagaaattgcggaaacccagcatggtaccattgttattcgtgttcagtatgaaggtgatggtagcccgtgtaaaattccgtttgaaattatggatctggaaaaacgtcatgttctgggtcgtctgattaccgttaatccgattgttaccgaaaaagatagcccggttaatattgaagcggaaccgccgtttggtgatagctatattattattggtgttgaaccgggtcagctgaaactgaattggtttaaaaaaggtagcagcattggtcag

SEQ ID NO: 685 - protein, 389 aa, Artificial Sequence
  pET/STF2delta.Den3 EIII
MAQVINTNSLSLLTQNNLNKSQSALGTAIERLSSGLRINSAKDDAAGQAIANRFTANIKGLTQASRNANDGISIAQTTEGALNEINNNLQRVRELAVQSANSTNSQSDLDSIQAEITQRLNEIDRVSGQTQFNGVKVLAQDNTLTIQVGANDGETIDIDLKQINSQTLGLDSLNVHGAPVDPASPWTENPLQKIDAALAQVDALRSDLGAVQNRFNSAITNLGNTVNNLSEARSRIEDSDYATEVSNMSRAQILQQAGTSVLAQANQVPQNVLSLLREFSRYPAQWRPLKGMSYAMCLNTFVLKKEVSETQHGTILIKVEYKGEDAPCKIPFSTEDGQGKAHNGRLITANPVVTKKEEPVNIEAEPPFGESNIVIGIGDKALKINWYRK

SEQ ID NO: 686 - DNA, 1185 bp, Artificial Sequence
  pET/STF2delta.Den3 EIII
atggcacaagtaatcaacactaacagtctgtcgctgctgacccagaataacctgaacaaatcccagtccgcactgggcaccgctatcgagcgtctgtcttctggtctgcgtatcaacagcgcgaaagacgatgcggcaggtcaggcgattgctaaccgtttcaccgcgaacatcaaaggtctgactcaggcttcccgtaacgctaacgacggtatctccattgcgcagaccactgaaggcgcgctgaacgaaatcaacaacaacctgcagcgtgtgcgtgaactggcggttcagtctgctaacagcaccaactcccagtctgacctcgactccatccaggctgaaatcacccagcgcctgaacgaaatcgaccgtgtatccggccagactcagttcaacggcgtgaaagtcctggcgcaggacaacaccctgaccatccaggttggcgccaacgacggtgaaactatcgatatcgatctgaagcagatcaactctcagaccctgggtctggactcactgaacgtgcatggagcgccggtggatcctgctagcccatggaccgaaaacccgctgcagaaaattgatgccgcgctggcgcaggtggatgcgctgcgctctgatctgggtgcggtacaaaaccgtttcaactctgctatcaccaacctgggcaataccgtaaacaatctgtctgaagcgcgtagccgtatcgaagattccgactacgcgaccgaagtttccaacatgtctcgcgcgcagattttgcagcaggccggtacttccgttctggcgcaggctaaccaggtcccgcagaacgtgctgtctctgttacgtgaattcagcagatatccagcacagtggcggccgctcaaaggaatgagttatgcaatgtgtttaaatacatttgtattaaaaaaagaagtaagtgaaacacaacatggaacaatattaataaaagtagaatataaaggagaagatgcaccatgtaaaataccatttagtacagaagatggacaaggaaaagcacataatggaagattaataacagcaaatccagtagtaacaaaaaaagaagaaccagtaaatatagaagcagaaccaccatttggagaaagtaatatagtaataggaataggagataaagcattaaaaataaattggtatagaaaaggaagtagtataggaaaa

SEQ ID NO: 687 - protein, 388 aa, Artificial Sequence
  pET/STF2delta.Den4 EIII
MAQVINTNSLSLLTQNNLNKSQSALGTAIERLSSGLRINSAKDDAAGQAIANRFTANIKGLTQASRNANDGISIAQTTEGALNEINNNLQRVRELAVQSANSTNSQSDLDSIQAEITQRLNEIDRVSGQTQFNGVKVLAQDNTLTIQVGANDGETIDIDLKQINSQTLGLDSLNVHGAPVDPASPWTENPLQKIDAALAQVDALRSDLGAVQNRFNSAITNLGNTVNNLSEARSRIEDSDYATEVSNMSRAQILQQAGTSVLAQANQVPQNVLSLLREFSRYPAQWRPLKGMSYTMCSGKFSIDKEMAETQHGTTVVKVKYEGAGAPCKVPIEIRDVNKEKVVGRIISPTPFAENTNSVTNIELERPLDSYIVIGVGDSALTLHWFRK

SEQ ID NO: 688 - DNA, 1185 bp, Artificial Sequence
  pET/STF2delta.Den4 EIII
atggcacaagtaatcaacactaacagtctgtcgctgctgacccagaataacctgaacaaatcccagtccgcactgggcaccgctatcgagcgtctgtcttctggtctgcgtatcaacagcgcgaaagacgatgcggcaggtcaggcgattgctaaccgtttcaccgcgaacatcaaaggtctgactcaggcttcccgtaacgctaacgacggtatctccattgcgcagaccactgaaggcgcgctgaacgaaatcaacaacaacctgcagcgtgtgcgtgaactggcggttcagtctgctaacagcaccaactcccagtctgacctcgactccatccaggctgaaatcacccagcgcctgaacgaaatcgaccgtgtatccggccagactcagttcaacggcgtgaaagtcctggcgcaggacaacaccctgaccatccaggttggcgccaacgacggtgaaactatcgatatcgatctgaagcagatcaactctcagaccctgggtctggactcactgaacgtgcatggagcgccggtggatcctgctagcccatggaccgaaaacccgctgcagaaaattgatgccgcgctggcgcaggtggatgcgctgcgctctgatctgggtgcggtacaaaaccgtttcaactctgctatcaccaacctgggcaataccgtaaacaatctgtctgaagcgcgtagccgtatcgaagattccgactacgcgaccgaagtttccaacatgtctcgcgcgcagattttgcagcaggccggtacttccgttctggcgcaggctaaccaggtcccgcagaacgtgctgtctctgttacgtgaattcagcagatatccagcacagtggcggccgctcaagggaatgtcatacacgatgtgtagtggtaaattctctatagacaaagagatggcagagacacaacacgggacaaccgtcgtgaaggttaagtatgaaggagctggcgcaccgtgcaaagtacccatcgaaattagggatgtaaacaaagagaaggtcgttgggcgtatcattagctcaaccccacttgcggaaaatactaattctgtaacgaacatagagttggaaccaccttttggtgatagctatatagttattggtgtgggcaatagtgccttaactctacattggtttagaaaaggatcctcgatcgggaaa

SEQ ID NO: 689 - protein, 27 aa, Artificial Sequence
  West Nile virus
LTSGHLKCRVKMEKLQLKGTTYGVCSK

SEQ ID NO: 690 - protein, 27 aa, Artificial Sequence
  Japanese encephalitis virus
LTSGHLKCRLKMDKLALKGTTYGMCTE

SEQ ID NO: 691 - protein, 27 aa, Artificial Sequence
  Dengue virus
IFAGHLKCRLKMDKLTLKGMSYVMCTG

SEQ ID NO: 692 - protein, 27 aa, Artificial Sequence
  Dengue virus
LFTGHLKCRLRMDKLQLKGMSYSMCTG

SEQ ID NO: 693 - protein, 27 aa, Artificial Sequence
  Dengue virus
IFAGHLKCRLKMDKLKLKGMSYAMCLN

SEQ ID NO: 694 - protein, 27 aa, Artificial Sequence
  Dengue virus
MFAGHLKCKVRMEKLRIKGMSYTMCSG

SEQ ID NO: 695 - protein, 27 aa, Artificial Sequence
  Flavivirus envelope protein
  VARIANT 1, 2, 3, 10, 11, 13, 16, 20, 21, 23, 24, 26, 27: Xaa = Any Amino Acid
XXXGHLKCRXXMXKLXLKGXXYXXCXX

SEQ ID NO: 696 - protein, 14 aa, Artificial Sequence
  Flavivirus envelope protein
GHLKCRMKLLKGYC

SEQ ID NO: 697 - protein, 100 aa, Artificial Sequence
  Dengue virus
KGMSYVMCTGSFKLEKEVAETQHGTVLVQVKYEGTDAPCKIPFSTQDEKGVTQNGRLITANPIVTDKEKPVNIEAEPPFGENYIVVGAGEKALKLSWFKK

SEQ ID NO: 698 - protein, 100 aa, Artificial Sequence
  Dengue virus
KGMSYSMCTGKFKVVKEIAETQHGTIVIRVQYEGDGSPCKTPFEIMDLEKRHVLGRLTTVNPIVTEKDSPVNIEAEPPFGDSYIIIGVEPGQLKLDWFKK

SEQ ID NO: 699 - protein, 100 aa, Artificial Sequence
  Dengue virus
KGMSYAMCLNTFVLKKEVSETQHGTILIKVEYKGEDAPCKIPFSTEDGQGKAHNGRLITANPVVTKKEEPVNIEAEPPFGESNIVIGIGDKALKINWYRK

SEQ ID NO: 700 - protein, 99 aa, Artificial Sequence
  Dengue virus
KGMSYTMCSGKFSIDKEMAETQHGTTVVKVKYEGAGAPCKVPIEIRDVNKEKVVGRIISPTPFAENTNSVTNIELERPLDSYIVIGVGDSALTLHWFRK

SEQ ID NO: 701 - protein, 20 aa, Artificial Sequence
  Flavivirus envelope protein
CRVKMEKLQLKGTTYGVCSK

SEQ ID NO: 702 - protein, 20 aa, Artificial Sequence
  Flavivirus envelope protein
SRVKMEKLQLKGTTYGVCSK

SEQ ID NO: 703 - protein, 20 aa, Artificial Sequence
  Flavivirus envelope protein
CRVKMEKLQLKGTTYGVSSK

SEQ ID NO: 704 - protein, 20 aa, Artificial Sequence
  Flavivirus envelope protein
SRVKMEKLQLKGTTYGVSSK

SEQ ID NO: 705 - protein, 20 aa, Artificial Sequence
  Flavivirus envelope protein
CRVKMEKLQLKGTTYGVCSK

SEQ ID NO: 706 - protein, 20 aa, Artificial Sequence
  Flavivirus envelope protein
ARVKMEKLQLKGTTYGVCSK

SEQ ID NO: 707 - protein, 20 aa, Artificial Sequence
  Flavivirus envelope protein
CAVKMEKLQLKGTTYGVCSK

SEQ ID NO: 708 - protein, 20 aa, Artificial Sequence
  Flavivirus envelope protein
CRAKMEKLQLKGTTYGVCSK

SEQ ID NO: 709 - protein, 20 aa, Artificial Sequence
  Flavivirus envelope protein
CRVAMEKLQLKGTTYGVCSK

SEQ ID NO: 710 - protein, 20 aa, Artificial Sequence
  Flavivirus envelope protein
CRVKAEKLQLKGTTYGVCSK

SEQ ID NO: 711 - protein, 20 aa, Artificial Sequence
  Flavivirus envelope protein
CRVKMAKLQLKGTTYGVCSK

SEQ ID NO: 712 - protein, 20 aa, Artificial Sequence
  Flavivirus envelope protein
CRVKMEALQLKGTTYGVCSK

SEQ ID NO: 713 - protein, 20 aa, Artificial Sequence
  Flavivirus envelope protein
CRVKMEKAQLKGTTYGVCSK

SEQ ID NO: 714 - protein, 20 aa, Artificial Sequence
  Flavivirus envelope protein
CRVKMEKLALKGTTYGVCSK

SEQ ID NO: 715 - protein, 20 aa, Artificial Sequence
  Flavivirus envelope protein
CRVKMEKLQAKGTTYGVCSK

SEQ ID NO: 716 - protein, 20 aa, Artificial Sequence
  Flavivirus envelope protein
CRVKMEKLQLAGTTYGVCSK

SEQ ID NO: 717 - protein, 20 aa, Artificial Sequence
  Flavivirus envelope protein
CRVKMEKLQLKATTYGVCSK

SEQ ID NO: 718 - protein, 20 aa, Artificial Sequence
  Flavivirus envelope protein
CRVKMEKLQLKGATYGVCSK

SEQ ID NO: 719 - protein, 20 aa, Artificial Sequence
  Flavivirus envelope protein
CRVKMEKLQLKGTAYGVCSK

SEQ ID NO: 720 - protein, 20 aa, Artificial Sequence
  Flavivirus envelope protein
CRVKMEKLQLKGTTAGVCSK

SEQ ID NO: 721 - protein, 20 aa, Artificial Sequence
  Flavivirus envelope protein
CRVKMEKLQLKGTTYAVCSK

SEQ ID NO: 722 - protein, 20 aa, Artificial Sequence
  Flavivirus envelope protein
CRVKMEKLQLKGTTYGACSK

SEQ ID NO: 723 - protein, 20 aa, Artificial Sequence
  Flavivirus envelope protein
CRVKMEKLQLKGTTYGVASK

SEQ ID NO: 724 - protein, 20 aa, Artificial Sequence
  Flavivirus envelope protein
CRVKMEKLQLKGTTYGVCAK

SEQ ID NO: 725 - protein, 20 aa, Artificial Sequence
  Flavivirus envelope protein
CRVKMEKLQLKGTTYGVCSA

SEQ ID NO: 726 - protein, 20 aa, Artificial Sequence
  Flavivirus envelope protein
CRVKMEKLQLKGTTYGVCSK

SEQ ID NO: 727 - protein, 20 aa, Artificial Sequence
  Flavivirus envelope protein
SNTVKLTSGHLKCRVKMEKL

SEQ ID NO: 728 - protein, 20 aa, Artificial Sequence
  Flavivirus envelope protein
NTVKLTSGHLKCRVKMEKLQ

SEQ ID NO: 729 - protein, 20 aa, Artificial Sequence
  Flavivirus envelope protein
TVKLTSGHLKCRVKMEKLQL

SEQ ID NO: 730 - protein, 20 aa, Artificial Sequence
  Flavivirus envelope protein
VKLTSGHLKCRVKMEKLQLK

SEQ ID NO: 731 - protein, 20 aa, Artificial Sequence
  Flavivirus envelope protein
KLTSGHLKCRVKMEKLQLKG

SEQ ID NO: 732 - protein, 20 aa, Artificial Sequence
  Flavivirus envelope protein
LTSGHLKCRVKMEKLQLKGT

SEQ ID NO: 733 - protein, 20 aa, Artificial Sequence
  Flavivirus envelope protein
TSGHLKCRVKMEKLQLKGTT

SEQ ID NO: 734 - protein, 20 aa, Artificial Sequence
  Flavivirus envelope protein
SGHLKCRVKMEKLQLKGTTY

SEQ ID NO: 735 - protein, 20 aa, Artificial Sequence
  Flavivirus envelope protein
GHLKCRVKMEKLQLKGTTYG

SEQ ID NO: 736 - protein, 20 aa, Artificial Sequence
  Flavivirus envelope protein
HLKCRVKMEKLQLKGTTYGV

SEQ ID NO: 737 - protein, 20 aa, Artificial Sequence
  Flavivirus envelope protein
LKCRVKMEKLQLKGTTYGVC

SEQ ID NO: 738 - protein, 20 aa, Artificial Sequence
  Flavivirus envelope protein
KCRVKMEKLQLKGTTYGVCS

SEQ ID NO: 739 - protein, 20 aa, Artificial Sequence
  Flavivirus envelope protein
CRVKMEKLQLKGTTYGVCSK

SEQ ID NO: 740 - protein, 20 aa, Artificial Sequence
  Flavivirus envelope protein
RVKMEKLQLKGTTYGVCSKA

SEQ ID NO: 741 - protein, 20 aa, Artificial Sequence
  Flavivirus envelope protein
VKMEKLQLKGTTYGVCSKAF

SEQ ID NO: 742 - protein, 20 aa, Artificial Sequence
  Flavivirus envelope protein
KMEKLQLKGTTYGVCSKAFK

SEQ ID NO: 743 - protein, 20 aa, Artificial Sequence
  Flavivirus envelope protein
MEKLQLKGTTYGVCSKAFKF

SEQ ID NO: 744 - protein, 20 aa, Artificial Sequence
  Flavivirus envelope protein
EKLQLKGTTYGVCSKAFKFL

SEQ ID NO: 745 - protein, 20 aa, Artificial Sequence
  Flavivirus envelope protein
KLQLKGTTYGVCSKAFKFLG

SEQ ID NO: 746 - protein, 20 aa, Artificial Sequence
  Flavivirus envelope protein
LQLKGTTYGVCSKAFKFLGT

SEQ ID NO: 747 - protein, 20 aa, Artificial Sequence
  Flavivirus envelope protein
QLKGTTYGVCSKAFKFLGTP

SEQ ID NO: 748 - protein, 20 aa, Artificial Sequence
  Flavivirus envelope protein
LKGTTYGVCSKAFKFLGTPA

SEQ ID NO: 749 - protein, 20 aa, Artificial Sequence
  Flavivirus envelope protein
KGTTYGVCSKAFKFLGTPAD

SEQ ID NO: 750 - protein, 20 aa, Artificial Sequence
  Flavivirus envelope protein
GTTYGVCSKAFKFLGTPADT

SEQ ID NO: 751 - protein, 20 aa, Artificial Sequence
  Flavivirus envelope protein
TTYGVCSKAFKFLGTPADTG

SEQ ID NO: 752 - protein, 20 aa, Artificial Sequence
  Flavivirus envelope protein
TYGVCSKAFKFLGTPADTGH

SEQ ID NO: 753 - DNA, 2760 bp, Artificial Sequence
  STF2.OVA
atggcacaagtaatcaacactaacagtctgtcgctgctgacccagaataacctgaacaaatcccagtccgcactgggcaccgctatcgagcgtctgtcttctggtctgcgtatcaacagcgcgaaagacgatgcggcaggtcaggcgattgctaaccgtttcaccgcgaacatcaaaggtctgactcaggcttcccgtaacgctaacgacggtatctccattgcgcagaccactgaaggcgcgctgaacgaaatcaacaacaacctgcagcgtgtgcgtgaactggcggttcagtctgctaacagcaccaactcccagtctgacctcgactccatccaggctgaaatcacccagcgcctgaacgaaatcgaccgtgtatccggccagactcagttcaacggcgtgaaagtcctggcgcaggacaacaccctgaccatccaggttggcgccaacgacggtgaaactatcgatatcgatctgaagcagatcaactctcagaccctgggtctggactcactgaacgtgcagaaagcgtatgatgtgaaagatacagcagtaacaacgaaagcttatgccaataatggtactacactggatgtatcgggtcttgatgatgcagctattaaagcggctacgggtggtacgaatggtacggcttctgtaaccggtggtgcggttaaatttgacgcagataataacaagtactttgttactattggtggctttactggtgctgatgccgccaaaaatggcgattatgaagttaacgttgctactgacggtacagtaacccttgcggctggcgcaactaaaaccacaatgcctgctggtgcgacaactaaaacagaagtacaggagttaaaagatacaccggcagttgtttcagcagatgctaaaaatgccttaattgctggcggcgttgacgctaccgatgctaatggcgctgagttggtcaaaatgtcttataccgataaaaatggtaagacaattgaaggcggttatgcgcttaaagctggcgataagtattacgccgcagattacgatgaagcgacaggagcaattaaagctaaaaccacaagttatactgctgctgacggcactaccaaaacagcggctaaccaactgggtggcgtagacggtaaaaccgaagtcgttactatcgacggtaaaacctacaatgccagcaaagccgctggtcatgatttcaaagcacaaccagagctggcggaagcagccgctaaaaccaccgaaaacccgctgcagaaaattgatgccgcgctggcgcaggtggatgcgctgcgctctgatctgggtgcggtacaaaaccgtttcaactctgctatcaccaacctgggcaataccgtaaacaatctgtctgaagcgcgtagccgtatcgaagattccgactacgcgaccgaagtttccaacatgtctcgcgcgcagattttgcagcaggccggtacttccgttctggcgcaggctaaccaggtcccgcagaacgtgctgtctctgttacgtctcgagggctccatcggcgcagcaagcatggaattttgttttgatgtattcaaggagctcaaagtccaccatgccaatgagaacatcttctactgccccattgccatcatgtcagctctagccatggtatacctgggtgcaaaagacagcaccaggacacaaataaataaggttgttcgctttgataaacttccaggattcggagacagtattgaagctcagtgtggcacatctgtaaacgttcactcttcacttagagacatcctcaaccaaatcaccaaaccaaatgatgtttattcgttcagccttgccagtagactttatgctgaagagagatacccaatcctgccagaatacttgcagtgtgtgaaggaactgtatagaggaggcttggaacctatcaactttcaaacagctgcagatcaagccagagagctcatcaattcctgggtagaaagtcagacaaatggaattatcagaaatgtccttcagccaagctccgtggattctcaaactgcaatggttctggttaatgccattgtcttcaaaggactgtgggagaaagcatttaaggatgaagacacacaagcaatgcctttcagagtgactgagcaagaaagcaaacctgtgcagatgatgtaccagattggtttatttagagtggcatcaatggcttctgagaaaatgaagatcctggagcttccatttgccagtgggacaatgagcatgttggtgctgttgcctgatgaagtctcaggccttgagcagcttgagagtataatcaactttgaaaaactgactgaatggaccagttctaatgttatggaagagaggaagatcaaagtgtacttacctcgcatgaagatggaggaaaaatacaacctcacatctgtcttaatggctatgggcattactgacgtgtttagctcttcagccaatctgtctggcatctcctcagcagagagcctgaagatatctcaagctgtccatgcagcacatgcagaaatcaatgaagcaggcagagaggtggtagggtcagcagaggctggagtggatgctgcaagcgtctctgaagaatttagggctgaccatccattcctcttctgtatcaagcacatcgcaaccaacgccgttctcttctttggcagatgtgtttccccttcgaagcttgaaggtaagcctatccctaaccctctcctcggtctcgattctacgcgtaccggtcatcatcaccatcaccat

SEQ ID NO: 754 - protein, 920 aa, Artificial Sequence
  STF2.OVA
MAQVINTNSLSLLTQNNLNKSQSALGTAIERLSSGLRINSAKDDAAGQAIANRFTANIKGLTQASRNANDGISIAQTTEGALNEINNNLQRVRELAVQSANSTNSQSDLDSIQAEITQRLNEIDRVSGQTQFNGVKVLAQDNTLTIQVGANDGETIDIDLKQINSQTLGLDSLNVQKAYDVKDTAVTTKAYANNGTTLDVSGLDDAAIKAATGGTNGTASVTGGAVKFDADNNKYFVTIGGFTGADAAKNGDYEVNVATDGTVTLAAGATKTTMPAGATTKTEVQELKDTPAVVSADAKNALIAGGVDATDANGAELVKMSYTDKNGKTIEGGYALKAGDKYYAADYDEATGAIKAKTTSYTAADGTTKTAANQLGGVDGKTEVVTIDGKTYNASKAAGHDFKAQPELAEAAAKTTENPLQKIDAALAQVDALRSDLGAVQNRFNSAITNLGNTVNNLSEARSRIEDSDYATEVSNMSRAQILQQAGTSVLAQANQVPQNVLSLLRLEGSIGAASMEFCFDVFKELKVHHANENIFYCPIAIMSALAMVYLGAKDSTRTQINKVVRFDKLPGFGDSIEAQCGTSVNVHSSLRDILNQITKPNDVYSFSLASRLYAEERYPILPEYLQCVKELYRGGLEPINFQTAADQARELINSWVESQTNGIIRNVLQPSSVDSQTAMVLVNAIVFKGLWEKAFKDEDTQAMPFRVTEQESKPVQMMYQIGLFRVASMASEKMKILELPFASGTMSMLVLLPDEVSGLEQLESIINFEKLTEWTSSNVMEERKIKVYLPRMKMEEKYNLTSVLMAMGITDVFSSSANLSGISSAESLKISQAVHAAHAEINEAGREVVGSAEAGVDAASVSEEFRADHPFLFCIKHIATNAVLFFGRCVSPSKLEGKPIPNPLLGLDSTRTGHHHHHH

SEQ ID NO: 755 - protein, 385 aa, Artificial Sequence
  OVA
GSIGAASMEFCFDVFKELKVHHANENIFYCPIAIMSALAMVYLGAKDSTRTQINKVVRFDKLPGFGDSIEAQCGTSVNVHSSLRDILNQITKPNDVYSFSLASRLYAEERYPILPEYLQCVKELYRGGLEPINFQTAADQARELINSWVESQTNGIIRNVLQPSSVDSQTAMVLVNAIVFKGLWEKAFKDEDTQAMPFRVTEQESKPVQMMYQIGLFRVASMASEKMKILELPFASGTMSMLVLLPDEVSGLEQLESIINFEKLTEWTSSNVMEERKIKVYLPRMKMEEKYNLTSVLMAMGITDVFSSSANLSGISSAESLKISQAVHAAHAEINEAGREVVGSAEAGVDAASVSEEFRADHPFLFCIKHIATNAVLFFGRCVSP

SEQ ID NO: 756 - DNA, 1156 bp, Artificial Sequence
  OVA
gggctccatcggcgcagcaagcatggaattttgttttgatgtattcaaggagctcaaagtccaccatgccaatgagaacatcttctactgccccattgccatcatgtcagctctagccatggtatacctgggtgcaaaagacagcaccaggacacaaataaataaggttgttcgctttgataaacttccaggattcggagacagtattgaagctcagtgtggcacatctgtaaacgttcactcttcacttagagacatcctcaaccaaatcaccaaaccaaatgatgtttattcgttcagccttgccagtagactttatgctgaagagagatacccaatcctgccagaatacttgcagtgtgtgaaggaactgtatagaggaggcttggaacctatcaactttcaaacagctgcagatcaagccagagagctcatcaattcctgggtagaaagtcagacaaatggaattatcagaaatgtccttcagccaagctccgtggattctcaaactgcaatggttctggttaatgccattgtcttcaaaggactgtgggagaaagcatttaaggatgaagacacacaagcaatgcctttcagagtgactgagcaagaaagcaaacctgtgcagatgatgtaccagattggtttatttagagtggcatcaatggcttctgagaaaatgaagatcctggagcttccatttgccagtgggacaatgagcatgttggtgctgttgcctgatgaagtctcaggccttgagcagcttgagagtataatcaactttgaaaaactgactgaatggaccagttctaatgttatggaagagaggaagatcaaagtgtacttacctcgcatgaagatggaggaaaaatacaacctcacatctgtcttaatggctatgggcattactgacgtgtttagctcttcagccaatctgtctggcatctcctcagcagagagcctgaagatatctcaagctgtccatgcagcacatgcagaaatcaatgaagcaggcagagaggtggtagggtcagcagaggctggagtggatgctgcaagcgtctctgaagaatttagggctgaccatccattcctcttctgtatcaagcacatcgcaaccaacgccgttctcttctttggcagatgtgtttcccct

SEQ ID NO: 757 - DNA, 18 bp, Artificial Sequence
  Primer
catctcagtgcaactaaa

SEQ ID NO: 758 - DNA, 18 bp, Artificial Sequence
  Primer
tagaaggcacagtcgagg

SEQ ID NO: 759 - DNA, 2736 bp, Artificial Sequence
  STF2.E
atggcacaagtaatcaacactaacagtctgtcgctgctgacccagaataacctgaacaaatcccagtccgcactgggcaccgctatcgagcgtctgtcttctggtctgcgtatcaacagcgcgaaagacgatgcggcaggtcaggcgattgctaaccgtttcaccgcgaacatcaaaggtctgactcaggcttcccgtaacgctaacgacggtatctccattgcgcagaccactgaaggcgcgctgaacgaaatcaacaacaacctgcagcgtgtgcgtgaactggcggttcagtctgctaacagcaccaactcccagtctgacctcgactccatccaggctgaaatcacccagcgcctgaacgaaatcgaccgtgtatccggccagactcagttcaacggcgtgaaagtcctggcgcaggacaacaccctgaccatccaggttggcgccaacgacggtgaaactatcgatatcgatctgaagcagatcaactctcagaccctgggtctggactcactgaacgtgcagaaagcgtatgatgtgaaagatacagcagtaacaacgaaagcttatgccaataatggtactacactggatgtatcgggtcttgatgatgcagctattaaagcggctacgggtggtacgaatggtacggcttctgtaaccggtggtgcggttaaatttgacgcagataataacaagtactttgttactattggtggctttactggtgctgatgccgccaaaaatggcgattatgaagttaacgttgctactgacggtacagtaacccttgcggctggcgcaactaaaaccacaatgcctgctggtgcgacaactaaaacagaagtacaggagttaaaagatacaccggcagttgtttcagcagatgctaaaaatgccttaattgctggcggcgttgacgctaccgatgctaatggcgctgagttggtcaaaatgtcttataccgataaaaatggtaagacaattgaaggcggttatgcgcttaaagctggcgataagtattacgccgcagattacgatgaagcgacaggagcaattaaagctaaaaccacaagttatactgctgctgacggcactaccaaaacagcggctaaccaactgggtggcgtagacggtaaaaccgaagtcgttactatcgacggtaaaacctacaatgccagcaaagccgctggtcatgatttcaaagcacaaccagagctggcggaagcagccgctaaaaccaccgaaaacccgctgcagaaaattgatgccgcgctggcgcaggtggatgcgctgcgctctgatctgggtgcggtacaaaaccgtttcaactctgctatcaccaacctgggcaataccgtaaacaatctgtctgaagcgcgtagccgtatcgaagattccgactacgcgaccgaagtttccaacatgtctcgcgcgcagattttgcagcaggccggtacttccgttctggcgcaggctaaccaggtcccgcagaacgtgctgtctctgttacgtttcaactgccttggaatgagcaacagagacttcttggaaggagtgtctggagcaacatgggtggatttggttctcgaaggcgacagctgcgtgactatcatgtctaaggacaagcctaccatcgatgtgaagatgatgaatatggaggcggccaacctggcagaggtccgcagttattgctatttggctaccgtcagcgatctctccaccaaagctgcgtgcccgaccatgggagaagctcacaatgacaaacgtgctgacccagcttttgtgtgcagacaaggagtggtggacaggggctggggcaacggctgcggactatttggcaaaggaagcattgacacatgcgccaaatttgcctgctctaccaaggcaataggaagaaccatcttgaaagagaatatcaagtacgaagtggccatttttgtccatggaccaactactgtggagtcgcacggaaactactccacacaggttggagccactcaggcagggagattcagcatcactcctgcagcgccttcatacacactaaagcttggagaatatggagaggtgacagtggactgtgaaccacggtcagggattgacaccaatgcatactacgtgatgactgttggaacaaagacgttcttggtccatcgtgagtggttcatggacctcaacctcccttggagcagtgctggaagtactgtgtggaggaacagagagacgttaatggagtttgaggaaccacacgccacgaagcagtctgtgatagcattgggctcacaagagggagctctgcatcaagctttggctggagccattcctgtggaattttcaagcaacactgtcaagttgacgtcgggtcatttgaagtgtagagtgaagatggaaaaattgcagttgaagggaacaacctatggcgtctgttcaaaggctttcaagtttcttgggactcccgcagacacaggtcacggcactgtggtgttggaattgcagtacactggcacggatggaccttgcaaagttcctatctcgtcagtggcttcattgaacgacctaacgccagtgggcagattggtcactgtcaacccttttgtttcagtggccacggccaacgctaaggtcctgattgaattggaaccaccctttggagactcatacatagtggtgggcagaggagaacaacagatcaatcaccattggcacaagtctggaagcagcattggcaaa

SEQ ID NO: 760 - protein, 912 aa, Artificial Sequence
  STF2.E
MAQVINTNSLSLLTQNNLNKSQSALGTAIERLSSGLRINSAKDDAAGQAIANRFTANIKGLTQASRNANDGISIAQTTEGALNEINNNLQRVRELAVQSANSTNSQSDLDSIQAEITQRLNEIDRVSGQTQFNGVKVLAQDNTLTIQVGANDGETIDIDLKQINSQTLGLDSLNVQKAYDVKDTAVTTKAYANNGTTLDVSGLDDAAIKAATGGTNGTASVTGGAVKFDADNNKYFVTIGGFTGADAAKNGDYEVNVATDGTVTLAAGATKTTMPAGATTKTEVQELKDTPAVVSADAKNALIAGGVDATDANGAELVKMSYTDKNGKTIEGGYALKAGDKYYAADYDEATGAIKAKTTSYTAADGTTKTAANQLGGVDGKTEVVTIDGKTYNASKAAGHDFKAQPELAEAAAKTTENPLQKIDAALAQVDALRSDLGAVQNRFNSAITNLGNTVNNLSEARSRIEDSDYATEVSNMSRAQILQQAGTSVLAQANQVPQNVLSLLRFNCLGMSNRDFLEGVSGATWVDLVLEGDSCVTIMSKDKPTIDVKMMNMEAANLAEVRSYCYLATVSDLSTKAACPTMGEAHNDKRADPAFVCRQGVVDRGWGNGCGLFGKGSIDTCAKFACSTKAIGRTILKENIKYEVAIFVHGPTTVESHGNYSTQVGATQAGRFSITPAAPSYTLKLGEYGEVTVDCEPRSGIDTNAYYVMTVGTKTFLVHREWFMDLNLPWSSAGSTVWRNRETLMEFEEPHATKQSVIALGSQEGALHQALAGAIPVEFSSNTVKLTSGHLKCRVKMEKLQLKGTTYGVCSKAFKFLGTPADTGHGTVVLELQYTGTDGPCKVPISSVASLNDLTPVGRLVTVNPFVSVATANAKVLIELEPPFGDSYIVVGRGEQQINHHWHKSGSSIGK

SEQ ID NO: 761 - protein, 495 aa, Artificial Sequence
  Dengue 1
MRCVGIGNRDFVEGLSGATWVDVVLEHGSCVTTMAKNKPTLDIELLKTEVTNPAVLRKLCIEAKISNTTTDSRCPTQGEATLVEEQDANFVCRRTFVDRGWGNGCGLFGKGSLITCAKFKCVTKLEGKIAQYENLKYSVIVTVHTGDQHQVGNETTEHGTTATITPQAPTSEIQLTDYGTLTLDCSPRTGLDFNEMVLLTMKKKSWLVHKQWFLDLPLPWTSGALTSQETWNRQDLLVTFKTAHAKKQEVVVLGSQEGAMHTALTGATEIQTSGTTTIFAGHLKCRLKMDKLTLKGMSYVMCTGSFKLEKEVAETQHGTVLVQVKYEGTDAPCKIPFSTQDEKGATQNGRLITANPIVTDKEKPVNIEAEPPFGESYIVVGAGEKALKLSWFKKGSSIGKMFEATARGARRMAILGDTAWDFGSIGGVFTSMGKLVHQVFGTAYGVLFSGVSWTMKIGIGILLTWLGLNSRNTSLSVMCIAVGMVTLYLGVMVQA

SEQ ID NO: 762 - DNA, 1485 bp, Artificial Sequence
  Dengue 1
atgcgatgcgtgggaataggcaacagagacttcgtggaaggactgtcaggagcaacatgggtggatgtggtactggagcatggaagttgcgtcaccaccatggcaaaaaacaaaccaacactggacattgaactcttgaagacggaggtcacaaaccctgcagttctgcgtaaattgtgcattgaagctaaaatatcaaacaccaccaccgattcgagatgtccaacacaaggagaagccacactggtggaagaacaagacgcgaactttgtgtgccgacgaacgttcgtggacagaggctggggcaatggctgtgggctattcggaaaaggtagtctaataacgtgtgccaagtttaagtgtgtgacaaaactagaaggaaagatagctcaatatgaaaacctaaaatattcagtgatagtcaccgtccacactggagatcagcaccaggtgggaaatgagactacagaacatggaacaactgcaaccataacacctcaagctcctacgtcggaaatacagctgaccgactacggaacccttacattagattgttcacctaggacagggctagattttaacgagatggtgttgctgacaatgaaaaagaaatcatggcttgtccacaaacagtggtttctagacttaccactgccttggacctctggggctttaacatcccaagagacttggaacagacaagatttactggtcacatttaagacagctcatgcaaagaagcaggaagtagtcgtactaggatcacaagaaggagcaatgcacactgcgctgactggagcgacagaaatccaaacgtcaggaacgacaacaattttcgcaggacacctaaaatgcagactaaaaatggacaaactaactttaaaagggatgtcatatgtgatgtgcacaggctcattcaagttagagaaagaagtggctgagacccagcatggaactgttctggtgcaggttaaatatgaaggaacagacgcaccatgcaagattcccttttcgacccaagatgagaaaggagcaacccagaatgggagattaataacagccaaccccatagtcactgacaaagaaaaaccagtcaatattgaggcagaaccaccctttggtgagagctacatcgtggtaggagcaggtgaaaaagctttgaaactaagctggttcaagaaaggaagcagcatagggaaaatgtttgaagcaactgcccgaggagcacgaaggatggccattctgggagacaccgcatgggacttcggttctataggaggagtgttcacgtctatgggaaaactggtacaccaggtttttggaactgcatatggagttttgtttagcggagtttcttggaccatgaaaataggaatagggattctgctgacatggctaggattaaattcaaggaacacgtccctttcggtgatgtgcatcgcagttggcatggtcacactgtacctaggagtcatggttcaggca

SEQ ID NO: 763 - protein, 495 aa, Artificial Sequence
  Dengue 2
MRCIGMSNRDFVEGVSGGSWVDIVLEHGSCVTTMAKNKPTLDFELIKTEAKQPATLRKYCIEAKLTNTTTESRCPTQGEPSLNEEQDKRFVCKHSMVDRGWGNGCGLFGKGGIVTCAMFRCKKNMEGKVVQPENLEYTIVITPHSGEEHAVGNDTGKHGKEIKITPQSSTTEAELTGYGTVTMECSPRTGLDFNEMVLLQMENKAWLVHRQWFLDLPLPWLPGADTQGSNWIQKETLVTFKNPHAKKQDVVVLGSQEGAMHTALTGATEIQMSSGNLLFTGHLKCRLRMDKLQLKGMSYSMCTGKFKVVKEIAETQHGTIVIRVQYEGDGSPCKIPFEIMDLEKRHVLGRLITVNPIVTEKDSPVNIEAEPPFGDSYIIIGVEPGQLKLNWFKKGSSIGQMFETTMRGAKRMAILGDTAWDFGSLGGVFTSIGKALHQVFGAIYGAAFSGVSWTMKILIGVIITWIGMNSRSTSLSVTLVLVGIVTLYLGVMVQA

SEQ ID NO: 764 - DNA, 1485 bp, Artificial Sequence
  Dengue 2
atgcgttgcataggaatgtcaaatagagactttgtggaaggggtttcaggaggaagctgggttgacatagtcttagaacatggaagctgtgtgacgacgatggcaaaaaacaaaccaacattggattttgaactgataaaaacagaagccaaacagcctgccaccctaaggaagtactgtatagaggcaaagctaaccaacacaacaacagaatctcgctgcccaacacaaggggaacccagcctaaatgaagagcaggacaaaaggttcgtctgcaaacactccatggtagacagaggatggggaaatggatgtggactatttggaaagggaggcattgtgacctgtgctatgttcagatgcaaaaagaacatggaaggaaaagttgtgcaaccagaaaacttggaatacaccattgtgataacacctcactcaggggaagagcatgcagtcggaaatgacacaggaaaacatggcaaggaaatcaaaataacaccacagagttccaccacagaagcagaattgacaggttatggcactgtcacaatggagtgctctccaagaacgggcctcgacttcaatgagatggtgttgctgcagatggaaaataaagcttggctggtgcacaggcaatggttcctagacctgccgttaccatggttgcccggagcggacacacaagggtcaaattggatacagaaagagacattggtcactttcaaaaatccccatgcgaagaaacaggatgttgttgttttaggatcccaagaaggggccatgcacacagcacttacaggggccacagaaatccaaatgtcatcaggaaacttactcttcacaggacatctcaagtgcaggctgagaatggacaagctacagctcaaaggaatgtcatactctatgtgcacaggaaagtttaaagttgtgaaggaaatagcagaaacacaacatggaacaatagttatcagagtgcaatatgaaggggacggctctccatgcaagatcccttttgagataatggatttggaaaaaagacatgtcttaggtcgcctgattacagtcaacccaattgtgacagaaaaagatagcccagtcaacatagaagcagaacctccattcggagacagctacatcatcataggagtagagccgggacaactgaagctcaactggtttaagaaaggaagttctatcggccaaatgtttgagacaacaatgaggggggcgaagagaatggccattttaggtgacacagcctgggattttggatccttgggaggagtgtttacatctataggaaaggctctccaccaagtctttggagcaatctatggagctgccttcagtggggtttcatggactatgaaaatcctcataggagtcattatcacatggataggaatgaattcacgcagcacctcactgtctgtgacactagtattggtgggaattgtgacactgtatttgggagtcatggtgcaggcc

SEQ ID NO: 765 - protein, 493 aa, Artificial Sequence
  Dengue 3
MRCVGVGNRDFVEGLSGATWVDVVLEHGGCVTTMAKNKPTLDIELQKTEATQLATLRKLCIEGKITNITTDSRCPTQGEAILPEEQDQNYVCKHTYVDRGWGNGCGLFGKGSLVTCAKFQCLEPIEGKVVQHENLKYTVIITVHTGDQHQVGNDTQGVTVEITPQASTVEAILPEYGTLGLECSPRTGLDFNEMILLTMKNKAWMVHRQWFFDLPLPWTSGATTETPTWNRKELLVTFKNAHAKKQEVVVLGSQEGAMHTALTGATEIQNSGGTSIFAGHLKCRLKMDKLELKGMSYAMCLNTFVLKKEVSETQHGTILIKVEYKGEDAPCKIPFSTEDGQGKAHNGRLITANPVVTKKEEPVNIEAEPPFGESNIVIGIGDKALKINWYKKGSSIGKMFEATARGARRMAILGDTAWDFGSVGGVLNSLGKMVHQIFGSAYTALFSGVSWIMKIGIGVLLTWIGLNSKNTSMSFSCIAIGIITLYLGAVVQA

SEQ ID NO: 766 - DNA, 1479 bp, Artificial Sequence
  Dengue 3
atgagatgcgtgggagtaggaaacagagattttgtggaaggtctgtcgggagctacgtgggttgatgtggtgctcgagcacggagggtgtgtgaccaccatggctaagaacaagcctacgctggacatagagctccagaagaccgaggccacccaactggcgaccctaagaaagttatgcattgagggaaaaattaccaacataacaactgactcaaggtgtcctacccagggggaagcgattttacctgaggagcaggaccagaactacgtatgtaagcacacatacgtggatagaggttggggaaacggttgtggtttgtttggaaaaggaagcttggtgacatgcgcgaaatttcaatgtctagaaccaatagagggaaaagtggtgcaacatgagaacctcaaatacactgtcatcatcacagtgcacacaggagaccaacaccaggtgggaaatgacacgcagggagtcacggttgagataacaccccaggcatcaaccgttgaagctatcttgcctgaatatggaacccttgggctagaatgttcaccacggacaggtttggatttcaacgaaatgattttattgacaatgaagaacaaagcatggatggtacataggcaatggttctttgacctacccctaccatggacatcaggagctacaacagagacaccaacttggaacaggaaagagctccttgtgacattcaagaatgcacatgcaaaaaagcaagaagtagttgtccttggatcgcaagagggagcaatgcacacagcgctgacaggagctacagagattcaaaactcaggaggtacaagcatttttgcggggcacttgaaatgtagacttaagatggacaaattggaactcaaggggatgagctatgcaatgtgcttgaatacctttgtgttgaagaaagaagtctctgaaacgcagcatgggacaatactcatcaaggttgagtacaaaggggaagatgcaccttgcaagattcctttctccacagaggatggacaagggaaagctcacaatggtagactgatcacagccaacccagtggtgaccaagaaggaggagcctgtcaacattgaggctgaacctccttttggggaaagtaacatagtgattgggattggagacaaagccttgaaaattaactggtacaagaagggaagctcgattggaaagatgttcgaggctactgccagaggtgcaaggcgcatggccatcttgggagacacagcctgggattttggttcagtgggtggtgttctgaattcattagggaaaatggtacaccaaatattcggaagtgcttacacagccctgtttagtggagtctcatggataatgaaaattggaataggtgtcctcttaacctggatagggttgaattcaaaaaacacttccatgtcattttcatgcattgcgataggaattattacactctatctgggagccgtggtacaagct

SEQ ID NO: 767 - protein, 491 aa, Artificial Sequence
  Dengue 4
MRCVGVGNRDFVEGVSGGAWVDLVLEHGGCVTTMAQGKPTLDFELTKTTAKEVALLRTYCIEASISNITTATRCPTQGEPYLKEEQDQQYICRRDVVDRGWGNGCGLFGKGGVVTCAKFSCSGKITGNLVRIENLEYTVVVTVHNGDTHAVGNDTSNHGVTAMITPRSPSVEVKLPDYGELTLDCEPRSGIDFNEMILMKMKKKTWLVHKQWFLDLPLPWTAGADTSEVHWNYKERMVTFKVPHAKRQDVTVLGSQEGAMHSALAGATEVDSGDGNHMFAGHLKCEVRMEKLRIKGMSYTMCSGKFSIDKEMAETQHGTTVVKVKYEGAGAPCKVPIEIRDVNKEKVVGRIISSTPLAENTNSVTNIELEPPFGDSYIVIGVGNSALTLHWFRKGSSIGKMFESTYRGAKRMAILGETAWDFGSVGGLFTSLGKAVHQVFGSVYTTMFGGVSWMIRILIGFLVLWIGTNSRNTSMAMTCIAVGGITLFLGF

SEQ ID NO: 768 - DNA, 1473 bp, Artificial Sequence
  Dengue 4
atgcgatgcgtaggagtaggaaacagagactttgtggaaggagtctcaggtggagcatgggtcgacctggtgctagaacatggaggatgcgtcacaaccatggcccagggaaaaccaaccttggattttgaactgaccaagacaacagccaaggaagtggctctgttaagaacctattgcattgaagcctcaatatcaaacataactacggcaacaagatgtccaacgcaaggagagccttatctgaaagaggaacaggaccaacagtacatttgccggagagatgtggtagacagagggtggggcaatggctgtggcttgtttggaaaaggaggagttgtgacatgtgcgaagttttcatgttcggggaagataacaggcaatttggtccgaattgagaaccttgaatacacagtggtggtaacagtccacaatggagacacccatgcagtaggaaatgacacatccaatcatggagttacagccatgataacccccaggtcaccatcggtggaagtcaaattgccggactatggagaactaacactcgattgtgaacccaggtctggaattgactttaatgagatgattctgatgaaaatgaaaaagaaaacatggctcgtgcataagcaatggtttttggatctgcctcttccatggacagcaggagcagacacatcagaggttcactggaattacaaagagagaatggtgacatttaaggttcctcatgccaagagacaggatgtgacagtgctgggatctcaggaaggagccatgcattctgccctcgctggagccacagaagtggactccggtgatggaaatcacatgtttgcaggacatctcaagtgcgaagtccgtatggagaaattgagaatcaagggaatgtcatacacgatgtgttcaggaaagttttcaattgacaaagagatggcagaaacacagcatgggacaacagtggtgaaagtcaagtatgaaggtgctggagctccgtgtaaagtccccatagagataagagatgtaaacaaggaaaaagtggttgggcgtatcatctcatccacccctttggctgagaataccaacagtgtaaccaacatagaattagaacccccctttggggacagctacatagtgataggtgttggaaacagcgcattaacactccattggttcaggaaagggagttccattggcaagatgtttgagtccacatacagaggtgcaaaacgaatggccattctaggtgaaacagcttgggattttggttccgttggtggattgttcacatcattgggaaaggctgtgcaccaggtttttggaagtgtgtatacaaccatgtttggaggagtctcatggatgattagaatcctaattgggttcttagtgttgtggattggcacgaactcaaggaacacttcaatggctatgacgtgcatagctgttggaggaatcactctgtttctgggcttc

SEQ ID NO: 769 - protein, 20 aa, Artificial Sequence
  West Nile virus
LTSGHLKCRVKMEKLQLKGT

SEQ ID NO: 770 - protein, 20 aa, Artificial Sequence
  West Nile virus
LTSGHLKCRVKMEKLQLKGT

SEQ ID NO: 771 - DNA, 1217 bp, Artificial Sequence
  Japanese encephalitis
tttaattgtctgggaatgggcaatcgtgacttcatagaaggagccagtggagccgcttgggtgacttggtgctagaaggagacagctgcttgacaatcatggcaaacgacaaaccaacattggacgtccgcatgattaacatcgaagctagccaacttgctgaggtcagaagttactgctatcatgcttcagtcactgacatctcgacggtggctcggtgccccacgactggagaagcccacaacgagaagcgagctgatagtagctatgtgtgcaaacaaggcttcactgaccgtgggtggggcaacggatgtggatttttcgggaagggaagcattgacacatgtgcaaaattctcctgcaccagtaaagcgattgggagaacaatccagccagaaaacatcaaatacaaagttggcatttttgtgcatggaaccaccacttcggaaaaccatgggaattattcagcgcaagttggggcgtcccaggcggcaaagtttacagtaacacccaatgctccttcggtagccctcaaacttggtgactacggagaagtcacactggactgtgagccaaggagtggactgaacactgaagcgttttacgtcatgaccgtggggtcaaagtcatttctggtccatagggagtggtttcatgacctcgctctcccctggacgtccccttcgagcacagcgtggagaaacagagaactcctcatggaatttgaaggggcgcacgccacaaaacagtccgttgttgctcttgggtcacaggaaggaggcctccatcatgcgttggcaggagccatcgtggtggagtactcaagctcagtgatgttaacatcaggccacctgaaatgtaggctgaaaatggacaaactggctctgaaaggcacaacctatggcatgtgtacagaaaaattctcgttcgcgaaaaatccggtggacactggtcacggaacagttgtcattgaactctcctactctgggagtgatggcccctgcaaaattccgattgtttccgttgcgagcctcaatgacatgacccccgttgggcggctggtgacagtgaaccccttcgtcgcgacttccagtgccaactcaaaggtgctggtcgagatggaaccccccttcggagactcctacatcgtagttggaaggggagacaagcagatcaaccaccattggcacaaagctggaagcacgctgggcaaggcc

SEQ ID NO: 772 - protein, 406 aa, Artificial Sequence
  Japanese encephalitis
FNCLGMGNRDFIEGASGAAWVDLVLEGDSCLTIMANDKPTLDVRMINIEASQLAEVRSYCYHASVTDISTVARCPTTGEAHNEKRADSSYVCKQGFTDRGWGNGCGFFGKGSIDTCAKFSCTSKAIGRTIQPENIKYKVGIFVHGTTTSENHGNYSAQVGASQAAKFTVTPNAPSVALKLGDYGEVTLDCEPRSGLNTEAFYVMTVGSKSFLVHREWFHDLALPWTSPSSTAWRNRELLMEFEGAHATKQSVVALGSQEGGLHHALAGAIVVEYSSSVMLTSGHLKCRLKMDKLALKGTTYGMCTEKFSFAKNPVDTGHGTVVIELSYSGSDGPCKIPIVSVASLNDMTPVGRLVTVNPFVATSSANSKVLVEMEPPFGDSYIVVGRGDKQINHHWHKAGSTLGKA

SEQ ID NO: 773 - protein, 5 aa, Artificial Sequence
  West Nile virus
MEKLQ

SEQ ID NO: 774 - protein, 6 aa, Artificial Sequence
  West Nile virus
MDKLAL

SEQ ID NO: 775 - protein, 496 aa, Artificial Sequence
  Tick-borne encephalitis
SRCTHLENRDFVTGTQGTTRVTLVLELGGCVTITAEGKPSMDVWLDSIYQENPAKTREYCLHAKLSDTKVAARCPTMGPATLTEEHQSGTVCKRDQSDRGWGNHCGLFGKGSIVTCVKVACEAKKKAIGHVYDANKIVYTVKVEPHTGDYVAANETHSGRKTASFTVSSEKTILTMGDYGDVPLLCRVASGVDLAQTVILELDKTLEHLPTAWQVHRDWFNDLALPWKHEGAQQWNNAERLVEFGAPHAVKMDVYNLGDQTGVLLKSLAGVPVAHIDGTKYHLKSGHVTCEVGLEKLKMKGLTYTMCDKTKFAWKRTPTDSGHDTVVMEVTFSGTKPCRIPVRAVAHGSPDVNVAMLITPNPTIENNGGGFIEMQLPPGDNIIYVGELSHQWFQKGSSIGRVFQKTRKGIERLTVIGEHAWDFGSTGGFLTSVGKALHTVLGGAFNSIFGGVGFLPKLLLGVALAWLGLNMRNPTMSMSFLLAGGLVLAMTLGVGA

SEQ ID NO: 776 - DNA, 1488 bp, Artificial Sequence
  Tick-borne encephalitis
tcgcggtgcacacatttggagaacagggactttgtcactggtactcagggaaccacgagagtgactctggtgttggagctggggggatgtgtcacgatcactgctgaggggaagccctcaatggatgtgtggctcgattccatctatcaggagaaccctgccaagacacgcgagtactgtctgcatgccaagctgtcggacaccaaagttgcggccagatgcccaacaatggggcctgccactctgactgaggagcatcagagtggtacggtgtgcaagagagaccagagtgaccgaggctggggcaatcactgcggattgtttggaaagggcagtattgtgacctgtgtcaaggtggcttgtgaggcaaagaagaaggccattggacatgtgtatgatgccaacaagatcgtgtacaccgttaaggttgagccacacacgggggactatgttgccgccaatgaaacccacagtgggaggaagacggcatccttcacggtctcctcagaaaagaccatcttgactatgggggactatggagatgtgcccttgttgtgcagagtcgccagtggcgttgacttggctcagactgtcattcttgagcttgacaagactctggaacaccttccaacagcctggcaggtccatcgtgactggttcaatgatctggctctaccgtggaaacacgaaggagcgcaacaatggaacaatgctgagcgactggttgaatttggagctccgcatgccgttaaaatggacgtgtataaccttggagatcaaactggggtgttgttgaagtcacttgctggggttcctgtggcgcacattgatggaacaaagtaccacctaaaaagcggccatgtaacatgcgaggttggactagaaaagctcaaaatgaagggtctcacatacacaatgtgtgacaaaacgaagttcgcatggaagcggactccaacagacagcggacatgacacagtggtcatggaggtcacgttctctggaacaaaaccttgcaggatcccagtgcgggcagtggcacacggctctccagatgtaaatgtggccatgctgataacaccaaaccccaccattgagaacaatggaggtggcttcatagagatgcagctacccccaggggataacatcatctatgttggggaactaagccatcagtggttccagaaggggagcagcatcggaagggtgtttcaaaagaccaggaagggcatcgagagactgacagtgataggagaacacgcctgggacttcggttccactggaggtttcttgacttcggtaggcaaagcgctgcacacagtcctcggcggagccttcaacagcatctttgggggagtggggtttctgcccaagctcctgttgggtgtggccttagcctggttgggcctgaacatgaggaaccccaccatgtccatgagtttcctcttggctgggggactggtcctggctatgacacttggagtgggtgct

SEQ ID NO: 777 - protein, 110 aa, Artificial Sequence
  Domain III of West Nile virus
LKGTTYGVCSKAFKFLGTPADTGHGTVVLELQYTGTDGPCKVPISSVASLNDLTPVGRLVTVNPFVSVATANAKVLIELEPPFGDSYIVVGRGEQQINHHWHKSGSSIGK

SEQ ID NO: 778 - protein, 110 aa, Artificial Sequence
  Domain III of Japanese encephalitis virus
KGTTYGMCTEKFSFAKNPVDTGHGTVVIELSYSGSDGPCKIPIVSVASLNDMTPVGRLVTVNPFVATSSANSKVLVEMEPPFGDSYIVVGRGDKQINHHWHKAGSTLGKA

SEQ ID NO: 779 - DNA, 345 bp, Artificial Sequence; identical to SEQ ID NO: 612
  West Nile EIII+

SEQ ID NO: 780 - protein, 23 aa, Artificial Sequence
  P. aeruginosa
MNNVLKFSALALAAVLATGCSSH

SEQ ID NO: 781 - DNA, 72 bp, Artificial Sequence
  P. aeruginosa
atgaaagctactaaactggtactgggcgcggtaatcctgggttctactctgctggcaggttgctccagcaac

SEQ ID NO: 782 - protein, 24 aa, Artificial Sequence
  E. coli
MKATKLVLGAVILGSTLLAGCSSN

SEQ ID NO: 783 - DNA, 72 bp, Artificial Sequence; identical to SEQ ID NO: 781
  E. coli

SEQ ID NO: 784 - protein, 11 aa, Artificial Sequence
  Linker
HGAPVDPASPW

SEQ ID NO: 785 - protein, 585 aa, B/Victoria/2/87 HA
MKAIIVLLMVVTSNADRICTGITSSNSPHVVKTATQGEVNVTGVIPLTTTPTKSHFANLKGTKTRGKLCPKCLNCTDLDVALGRPKCTGTIPSAKASILHEVKPVTSGCFPIMHDRTKIRQLPNLLRGYEHIRLSTHNVINAETAPGGPYKVGTSGSCPNVTNGNGFFATMAWAVPKNDNNKTATNPLTVEVPYICTEGEDQITVWGFHSDNEAQMVKLYGDSKPQKFTSSANGVTTHYVSQIGGFPNQAEDGGLPQSGRIVVDYMVQKSGKTGTITYQRGILLPQKVWCASGRSKVIKGSLPLIGEADCLHEKYGGLNKSKPYYTGEHAKAIGNCPIWVKTPLKLANGTKYRPPAKLLKEKGFFGAIAGFLEGGWEGMIAGWHGYTSHGAHGVAVAADLKSTQEAINKITKNLNSLSELEVKNLQRLSGAMDELHNKILELDEKVDDLRADTISSQIELAVLLSNEGIINSEDEHLLALERKLKKMLGPSAVEIGNGCFETKHKCNQTCLDRIAAGTFNAGEFSLPTFDSLNITAASLNDDGLDNHTILLYYSTAASSLAVTLMIAIFIVYMVSRDNVSCSICL

SEQ ID NO: 786 - protein, 535 aa, Artificial Sequence
  Cross-reactive mutant (CRM) of diphtheria toxin including, CRM197
GADDVVDSSKSFVMENFSSYHGTKPGYVDSIQKGIQKPKSGTQGNYDDDWKGFYSTDNKYDAAGYSVDNENPLSGKAGGVVKVTYPGLTKVLALKVDNAETIKKELGLSLTEPLMEQVGTEEFIKRFGDGASRVVLSLPFAEGSSSVEYINNWEQAKALSVELEINFETRGKRGQDAMYEYMAQACAGNRVRRSVGSSLSCINLDWDVIRDKTKTKIESLKEHGPIKNKMSESPNKTVSEEKAKQYLEEFHQTALEHPELSELKTVTGTNPVFAGANYAAWAVNVAQVIDSETADNLEKTTAALSILPGIGSVMGIADGAVHHNTEEIVAQSIALSSLMVAQAIPLVGELVDIGFAAYNFVESIINLFQVVHNSYNRPAYSPGHKTQPFLHDGYAVSWNTVEDSIIRTGFQGESGHDIKITAENTPLPIAGVLLPTIPGKLDVNKSKTHISVNGRKIRMRCRAIDGDVTFCRPKSPVYVGNGVHANLHVAFHRSSSEKIHSNEISSDSIGVLGYQKTVDHTKVNSKLSLFFEIKS

SEQ ID NO: 787 - protein, 164 aa, Artificial Sequence
  Coat protein of Tobacco mosaic virus (TMV)
MMAYSIPTPSQLVYFTENYADYIPFVNRLINARSNSFQTQSGRDELREILIKSQVSVVSPISRFPAEPAYYIYLRDPSISTVYTALLQSTDTRNRVIEVENSTNVTTAEQLNAVRRTDDASTAIHNNLEQLLSLLTNGTGVFNRTSFESASGLTWLVTTTPRTA

SEQ ID NO: 788 - protein, 221 aa, Artificial Sequence
  Coat protein of alfalfa mosaic virus (AMV)
MSSSQKKAGGKAGKPTKRSQNYAALRKAQLPKPPALKVPVAKPTNTILPQTGCVWQSLGTPLSLSSSNGLGARFLYSFLKDFAAPRILEEDLIFRMVFSITPSHAGSFCLTDDVTTEDGRAVAHGNPMQEFPHGAFHANEKFGFELVFTAPTHAGMQNQNFKHSYAVALCLDFDALPEGSRNPSYRFNEVWVERKAFPRAGPLRSLITVGLFDDADDLDRQ

SEQ ID NO: 789 - protein, 237 aa, Artificial Sequence
  Coat protein of Potato virus X
MTTPANTTQATGSTTSTTTKTAGATPATTSGLFTIPDGEFFSTARAIVASNAVATNEDLSKIEAIWKDMKVPTDTMAQAAWDLVRHCADVGSSAQTEMIDTGPYSNGISRARLAAAIKEVCTLRQFCMKYAPVVWNWMLTNNSPPANWQAQGFKPEHKFAAFDFFNGVTNPAAIMPKEGLIRPPSEAEMNAAQTAAFVKITKARAQSNDFASLDAAVTRGRITGTTTAEAVVTLPPP

SEQ ID NO: 790 - protein, 395 aa, Artificial Sequence
  class I outer membrane protein of Neisseria meningitidis
MRKKLTALVLSALPLAAVADVSLYGEIKAGVEGRNYQLQLTEAQAANGGASGQVKVTKVTKAKSRIRTKISDFGSFIGFKGSEDLGEGLKAVWQLEQDVSVAGGGATQWGNRESFIGLAGEFGTLRAGRVANQFDDASQAIDPWDSNNDVASQLGIFKRHDDMPVSVRYDSPEFSGFSGSVQFVPAQNSKSAYKPAYWTTVNTGSATTTTFVPAVVGKPGSDVYYAGLNYKNGGFAGNYAFKYARHANVGRDAFELFLLGSGSDQAKGTDPLKNHQVHRLTGGYEEGGLNLALAAQLDLSENGDKTKNSTTEIAATASYRFGNAVPRISYAHGFDFIERGKKGENTSYDQIIAGVDYDFSKRTSAIVSGAWLKRNTGIGNYTQINAASVGLRHKF

SEQ ID NO: 791 - protein, 347 aa, Artificial Sequence
  Major fimbrial subunit protein type I (Fimbrillin)
MVLKTSNSNRAFGVGDDESKVAKLTVMVYNGEQQEAIKSAENATKVEDIKCSAGQRTLVVMANTGAMELVGKTLAEVKALTTELTAENQEAAGLIMTAEPKTIVLKAGKNYIGYSGTGEGNHIENDPLKIKRVHARMAFTEIKVQMSAAYDNIYTFVPEKIYGLIAKKQSNLFGATLVNADANYLTGSLTTFNGAYTPANYANVPWLSRNYVAPAADAPQGFYVLENDYSANGGTIHPTILCVYGKLQKNGADLAGADLAAAQAANWVDAEGKTYYPVLVNFNSNNYTYDSNYTPKNKIERNHKYDIKLTITGPGTNNPENPITESAHLNVQCTVAEWVLVGQNATW

SEQ ID NO: 792 - protein, 428 aa, Artificial Sequence
  Mycoplasma fermentans macrophage activating lipopeptide (MALP-2)
MKKSKKILLGLSPIAAVLPAVAVSCGNNDESNISFKEKDISKYTTTNANGKQVVKNAELLKLKPVLITDEGKIDDKSFNQSAFEALKAINKQTGIEINSVEPSSNFESAYNSALSAGHKIWVLNGFKHQQSIKQYIDAHREELERNQIKIIGIDFDIETEYKWFYSLQFNIKESAFTTGYAIASWLSEQDESKRVVASFGVGAFPGVTTFNEGFAKGILYYNQKHKSSKIYHTSPVKLDSGFTAGEKMNTVINNVLSSTPADVKYNPHVILSVAGPATFETVRLANKGQYVIGVDSDQGMIQDKDRILTSVLKHIKQAVYETLLDLILEKEEGYKPYVVKDKKADKKWSHFGTQKEKWIGVAENHFSNTEEQAKINNKIKEAIKMFKELPEDFVKYINSDKALKDGNKIDNVSERLEAIISAINKAAK

SEQ ID NO: 793 - protein, 143 aa, Artificial Sequence
  p19 protein of Mycobacterium tuberculosis
ATTLPVQRHPRSLFPEFSELFAAFPSFAGLRPTFDTRLMRLEDEMKEGRYEVRAELPGVDPDKDVDIMVRDGQLTIKAERTEQKDFDGRSEFAYGSFVRTVSLPVGADEDDIKATYDKGILTVSVAVSEGKPTEKHIQIRSTN

SEQ ID NO: 794 - protein, 19 aa, Artificial Sequence
  muturational cleavage site
NVPEKQTRGIFGAIAGFIE

SEQ ID NO: 795 - protein, 19 aa, Artificial Sequence
  muturational cleavage site
NIPSIQSRGLFGAIAGFIE

SEQ ID NO: 796 - protein, 19 aa, Artificial Sequence
  muturational cleavage site
PAKLLKERGFFGAIAGFLE

SEQ ID NO: 797 - protein, 19 aa, Artificial Sequence
  muturational cleavage site
RERRRKKRGLFGAIAGFIE

SEQ ID NO: 798 - protein, 19 aa, Artificial Sequence
  muturational cleavage site
NVPEKQTRGIFGAIAGFIE

SEQ ID NO: 799 - protein, 19 aa, Artificial Sequence
  muturational cleavage site
NVPQIESRGLFGAIAGFIE

SEQ ID NO: 800 - protein, 19 aa, Artificial Sequence
  muturational cleavage site
NIPSIQSRGLFGAIAGFIE

SEQ ID NO: 801 - protein, 12 aa, Artificial Sequence
  muturational cleavage site
RGLFGAIAGFIE

SEQ ID NO: 802 - protein, 19 aa, Artificial Sequence
  muturational cleavage site
PAKLLKERGFFGAIAGFLE

SEQ ID NO: 803 - protein, 12 aa, Artificial Sequence
  muturational cleavage site
RGFFGAIAGFLE

SEQ ID NO: 804 - protein, 24 aa, Artificial Sequence
  muturational cleavage site
SLLTEVETPIRNEWGSRSNDSSDP

SEQ ID NO: 805 - protein, 29 aa, Artificial Sequence
  muturational cleavage site
GSGAGSLLTEVETPTRNEWECRCSDSSDP

SEQ ID NO: 806 - protein, 29 aa, Artificial Sequence
  muturational cleavage site
GSGAGSLLTEVETLTRNGWGCRCSDSSDP

SEQ ID NO: 807 - protein, 20 aa, Artificial Sequence
  muturational cleavage site
LTSGHLKCRVKMEKLQLKGT

SEQ ID NO: 808 - protein, 27 aa, Artificial Sequence
  muturational cleavage site
EAEPPFGDSYIIIGVEPGQLKLNWFKK

SEQ ID NO: 809 - protein, 24 aa, Artificial Sequence
  muturational cleavage site
SLLTEVETPIRNEWGSRSNDSSDP

SEQ ID NO: 810 - protein, 494 aa, S. typhimurium flagellin (P06179)
AQVINTNSLSLLTQNNLNKSQSALGTAIERLSSGLRINSAKDDAAGQAIANRFTANIKGLTQASRNANDGISIAQTTEGALNEINNNLQRVRELAVQSANSTNSQSDLDSIQAEITQRLNEIDRVSGQTQFNGVKVLAQDNTLTIQVGANDGETIDIDLKQINSQTLGLDTLNVQQKYKVSDTAATVTGYADTTIALDNSTFKASATGLGGTDQKIDGDLKFDDTTGKYYAKVTVTGGTGKDGYYEVSVDKTNGEVTLAGGATSPLTGGLPATATEDVKNVQVANADLTEAKAALTAAGVTGTASVVKMSYTDNNGKTIDGGLAVKVGDDYYSATQNKDGSISINTTKYTADDGTSKTALNKLGGADGKTEVVSIGGKTYAASKAEGHNFKAQPDLAEAAATTTENPLQKIDAALAQVDTLRSDLGAVQNRFNSAITNLGNTVNNLTSARSRIEDSDYATEVSNMSRAQILQQAGTSVLAQANQVPQNVLSLLR

SEQ ID NO: 811 - protein, 504 aa, Salmonella muenchen flagellin (P06177)
AQVINTNSLSLLTQNNLNKSQSALGTAIERLSSGLRINSAKDDAAGQAIANRFTANIKGLTQASRNANDGISIAQTTEGALNEINNNLQRVRELAVQSANGTNSQSDLDSIQAEITQRLNEIDRVSGQTQFNGVKVLAQDNTLTIQVGANDGETIDIDLKEISSKTLGLDKLNVQDAYTPKETAVTVDKTTYKNGTDTITAQSNTDIQTAIGGGATGVTGADIKFKDGQYYLDVKGGASAGVYKATYDETTKKVNIDTTDKTPLATAEATAIRGTATITHNQIAEVTKEGVDTTTVAAQLAAAGVTGADKDNTSLVKLSFEDKNGKVIDGGYAVKMGDDFYAATYDEKQVQLLLNNHYTDGAGVLQTGAVKFGGANGKSEVVTATVGKTYLASDLDKHNFRTGGELKEVNTDKTENPLQKIDAALAQVDTLRSDLGAVQNRFNSAITNLGNTVNNLSSARSRIEDSDYATEVSNMSRAQILQQAGTSVLAQANQVPQNVLSLLR

SEQ ID NO: 812 - protein, 497 aa, E. coli flagellin (P04949)
AQVINTNSLSLITQNNINKNQSALSSSIERLSSGLRINSAKDDAAGQAIANRFTSNIKGLTQAARNANDGISVAQTTEGALSEINNNLQRVRELTVQATTGTNSESDLSSIQDEIKSRLDEIDRVSGQTQFNGVNVLAKNGSMKIQVGANDNQTITIDLKQIDAKTLGLDGFSVKNNDTVTTSAPVTAFGATTTNNIKLTGITLSTEAATDTGGTNPASIEGVYTDNGNDYYAKITGGDNDGKYYAVTVANDGTVTMATGATANATVTDANTTKATTITSGGTPVQIDNTAGSATANLGAVSLVKLQDSKGNDTDTYALKDTNGNLYAADVNETTGAVSVKTITYTDSSGAASSPTAVKLGGDDGKTEVVDIDGKTYDSADLNGGNLQTGLTAGGEALTAVANGKTTDPLKALDDAIASVDKFRSSLGAVQNRLDSAVTNLNNTTTNLSEAQSRIQDADYATEVSNMSKAQIIQQAGNSVLAKANQVPQQVLSLLQG

SEQ ID NO: 813 - protein, 393 aa, pseudomonas aerugienosa
ALTVNTNIASLNTQRNLNNSSASLNTSLQRLSTGSRINSAKDDAAGLQIANRLTSQVNGLNVATKNANDGISLAQTAEGALQQSTNILQRMRDLSLQSANGSNSDSERTALNGEVKQLQKELDRISNTTTFGGRKLLDGSFGVASFQVGSAANEIISVGIDEMSAESLNGTYFKADGGGAVTAATASGTVDIAIGITGGSAVNVKVDMKGNETAEQAAAKIAAAVNDANVGIGAFSDGDTISYVSKAGKDGSGAITSAVSGVVIADTGSTGVGTAAGVTPSATAFAKTNDTVAKIDISTAKGAQSAVLVIDEAIKQIDAQRADLGAVQNRFDNTINNLKNIGENVSAARGRIEDTDFAAETANLTKNQVLQQAGTAILAQANQLPQSVLSLLR

SEQ ID NO: 814 - DNA, 345 bp, Artificial Sequence; identical to SEQ ID NO: 612
  EIII+

SEQ ID NO: 815 - protein, 116 aa, Artificial Sequence; identical to SEQ ID NO: 680
  JEIII+

SEQ ID NO: 816 - DNA, 348 bp, Artificial Sequence; identical to SEQ ID NO: 679
  JEIII+

SEQ ID NO: 817 - protein, 287 aa, Listeria monocytogenes
MKVNTNIISLKTQEYLRKNNEGMTQAQERLASGKRINSSLDDAAGLAVVTRMNVKSTGLDAASKNSSMGIDLLQTADSALSSMSSILQRMRQLAVQSSNGSFSDEDRKQYTAEFGSLIKELDHVADTTNYNNIKLLDQTATNAATQVSIQASDKANDLINIDLFNAKGLSAGTITLGSGSTVAGYSALSVADADSSQEATEAIDELINNISNGRALLGAGMSRLSYNVSNVNNQSIATKASASSIEDADMAAEMSEMTKYKILTQTSISMLSQANQTPQMLTQLINS

SEQ ID NO: 818 - protein, 12 aa, Artificial Sequence
  muturational cleavage site
  VARIANT 4: Xaa = Any Amino Acid
RGLXGAIAGFIE

SEQ ID NO: 819 - protein, 12 aa, Artificial Sequence
  muturational cleavage site
  VARIANT 4: Xaa = Any Amino Acid
RGLXGAIAGFIE

SEQ ID NO: 820 - protein, 4 aa, Artificial Sequence
  flagellin peptide
TIAL

SEQ ID NO: 821 - protein, 4 aa, Artificial Sequence
  flagellin peptide
TTLD

SEQ ID NO: 822 - protein, 7 aa, Artificial Sequence
  flagellin peptide
GTDQKID

SEQ ID NO: 823 - protein, 6 aa, Artificial Sequence
  flagellin peptide
NGEVTL

SEQ ID NO: 824 - protein, 12 aa, Artificial Sequence
  muturational cleavage site
SGLDDAAIKAAT

SEQ ID NO: 825 - protein, 12 aa, Artificial Sequence
  muturational cleavage site
RGIFGAIAGFIE

SEQ ID NO: 826 - protein, 5 aa, Artificial Sequence
  flagellin peptides
GADAA

SEQ ID NO: 827 - protein, 4 aa, Artificial Sequence
  flagellin peptides
AGGA

SEQ ID NO: 828 - protein, 4 aa, Artificial Sequence
  flagellin peptides
PATA

SEQ ID NO: 829 - protein, 4 aa, Artificial Sequence
  flagellin peptides
AAGA

SEQ ID NO: 830 - protein, 4 aa, Artificial Sequence
  flagellin peptides
ATTK

SEQ ID NO: 831 - protein, 12 aa, Artificial Sequence
  flagellin peptides
AGATKTTMPAGA

SEQ ID NO: 832 - protein, 5 aa, Artificial Sequence
  flagellin peptides
VTGTG

SEQ ID NO: 833 - protein, 10 aa, Artificial Sequence
  flagellin peptides
TEAKAALTAA

SEQ ID NO: 834 - protein, 11 aa, Artificial Sequence
  flagellin peptides
ASVVKMSYTDN

SEQ ID NO: 835 - protein, 9 aa, Artificial Sequence
  flagellin peptides
VDATDANGA

SEQ ID NO: 836 - protein, 19 aa, Artificial Sequence
  muturational cleavage site
RERRRKKRGLFGAIAGFIE

SEQ ID NO: 837 - protein, 494 aa, Artificial Sequence
  flagellin 1UCU
AQVINTNSLSLLTQNNLNKSQSALGTAIERLSSGLRINSAKDDAAGQAIANRFTANIKGLTQASRNANDGISIAQTTEGALNEINNNLQRVRELAVQSANSTNSQSDLDSIQAEITQRLNEIDRVSGQTQFNGVKVLAQDNTLTIQVGANDGETIDIDLKQINSQTLGLDTLNVQQKYKVSDTAATVTGYADTTIALDNSTFKASATGLGGTDQKIDGDLKFDDTTGKYYAKVTVTGGTGKDGYYEVSVDKTNGEVTLAGGATSPLTGGLPATATEDVKNVQVANADLTEAKAALTAAGVTGTASVVKMSYTDNNGKTIDGGLAVKVGDDYYSATQNKDGSISINTTKYTADDGTSKTALNKLGGADGKTEVVSIGGKTYAASKAEGHNFKAQPDLAEAAATTTENPLQKIDAALAQVDTLRSDLGAVQNRFNSAITNLGNTVNNLTSVRSRIEDSDYATEVSNMSRAQILQQAGTSVLAQANQVPQNVLSLLR

SEQ ID NO: 838 - protein, 505 aa, Artificial Sequence
  flagellin Sf1a
AQVINTNSLSLLTQNNLNKSQSALGTAIERLSSGLRINSAKDDAAGQAIANRFTANIKGLTQASRNANDGISIAQTTEGALNEINNNLQRVRELAVQSANSTNSQSDLDSIQAEITQRLNEIDRVSGQTQFNGVKVLAQDNTLTIQVGANDGETIDIDLKQINSQTLGLDSLNVQKAYDVKDTAVTTKAYANNGTTLDVSGLDDAAIKAATGGTNGTASVTGGAVKFDADNNKYFVTIGGFTGADAAKNGDYEVNVATDGTVTLAAGATKTTMPAGATTKTEVQELKDTPAVVSADAKNALIAGGVDATDANGAELVKMSYTDKNGKTIEGGYALKAGDKYYAADYDEATGAIKAKTTSYTAADGTTKTAANQLGGVDGKTEVVTIDGKTYNASKAAGHDFKAQPELAEAAAKTTENPLQKIDAALAQVDALRSDLGAVQNRFNSAITNLGNTVNNLSEARSRIEDSDYATEVSNMSRAQILQQAGTSVLAQANQVPQNVLSLLR

SEQ ID NO: 839 - protein, 4 aa, Artifical Sequence
  Linker
CSSN

1. A composition comprising at least a portion of a S. typhimurium flagellin, wherein the S. typhimurium flagellin includes at least one cysteine residue and activates a Toll-like Receptor 5.

2. The composition of claim 1, wherein the cysteine residue is remote to at least one amino acid of the Toll-like Receptor 5 recognition site of the S. typhimurium flagellin.

3. The composition of claim 1, further including at least a portion of at least one influenza antigen.

4. The composition of claim 1, wherein the influenza antigen includes at least a portion of a hemagglutinin influenza antigen.

5. The composition of claim 4, wherein the portion of the hemagglutinin protein includes at least a portion of a maturational cleavage site of the hemagglutinin protein.

6. The composition of claim 1, wherein the S. typhimurium flagellin includes at least a portion of SEQ ID NO: 810.

7. The composition of claim 1, wherein at least one cysteine residue substitutes for at least one amino acid in a naturally occurring flagellin amino acid sequence of the S. typhimurium flagellin.

8. A composition comprising a Toll-like Receptor agonist component that is at least a portion of a Toll-like Receptor agonist, wherein the Toll-like Receptor agonist component includes at least one cysteine residue in a position where a cysteine residue does not occur in the native Toll-like Receptor agonist, whereby the Toll-like Receptor agonist component activates a Toll-like Receptor.

9. A composition comprising a flagellin component that is at least a portion of a flagellin, wherein at least one lysine of the flagellin component has been substituted with at least one arginine, whereby the flagellin component activates a Toll-like Receptor 5.
